United States Patent Application Publication US 2026/0275333 A1 - sequence listing, part 2

SEQ ID NO: 3045 - RNA, 64444167 nt, Homo sapiens (residues 2,148,140-4,296,278 of 64,444,167)
  source 1..64444167: mol_type = mRNA
aggaggaagggagcctcttcaggggcactggaatcttttgtgccaggggcttcttttcatcagagccggggagtacattgcagtgacttcttaaacatttgtgtgggacagacgagcgtgagggaggttttaagccaggcacaaagttagtttccaatactagttaataaatctatttttcttcatttcctttttttgcacagaagctggtaatctaggacctacgtgtgaacaactttatatgaatattttttgtacttggtttacttgggttggtatgatacattatatttaagttccttgaacactgtggatcccctaatgtgtatgaatgactgaggctttgtaaattaagggacgtttgtgtgaataaagttatttgatggggtcaaagaagccatatgtgatttgaaaaagagtgttttgtggtttgttgcccctgtttgggagggtggcaaggccagcccatgcgcagccccccatcccagctggtgggtggtgggagagaaggatccttggccgtttccatgtccccgtgcttgaagaagctgcctgatggcctttgactgaccttcccattctacacctgagaaaccagcacttggaagtgcaggaagctatctgaaatcgtgcagctgccactgggggatcctggatccaaactaagcctagtctgcccttccagggggtccggggcctaagcaaacattgtgggcccctcctccagacatctcagaagccccctcaacccccaaccctgtggttctgcaagttctgcctttgagagagttttaacaaagagctaaaaagggggggtctccataccacagcagtaaaggtgtaaggatcaagttttggaaaagctcagcagagaggtcggttccatgagaggtcagaggtcaggtcagtggcctgaggttggtagcacccgtgtccaaaaagcaaaggggtccaatcaagccaggccatcctggttgggttgggaatgggaaaaagagcacatagtccatctccctttctgcctgggccaacaaaagccacattccatgaggaccagggactggaatttatgaaaagccacatgtttttgtgaccatcgtactgcatagcaggtgtgatgtatgctcctctacgcataagagaactaaaacccagagaaatcaagactgctgggtgagtgccaggcgggctggggaaagagctcccgccacttgccagccgggacaggtaactgagcctcgctgaacatctacttcctcaacgaaagtgggggtgatgacagctaccttcagacaagttgcaggctaaataagaacctaatattgggcccagcacatagtaggcactgaaatggttttttgattttcccaaagagacaggtttgggattcttccggagtctgctgagcactaagccccaactcctggcatcgcgcagctttggtgaggctgcccagtctggtgagggttgatgttgactgtggagcccatcattcaggggctgtcccagggagacccggggaacccaggacaaatacaactcctgcaggaggatggagtcaggacttaggaatgtgtaagttagaagaaaagagaagactggcttgcctaatctgcgagtgaataagctacattctgggcccaagagttggtgcccagtggctgctggggatggggcttccagaaaaggatacttctgtccttagcctgggcgataacctggagcttgaaggacagccaacaaatttgttttcttattaacagatttttttagagaattcatccttctgaagagtgcaattcagtggtttttagtacatgtacagagttgggcagccattacactagctaataccggaacatctcctcaaaagaaaaaaaaaaaaaaatccatgcctgctggcagtcacttcctagtccttccatgtttttcatttccttgggtatataccaagcagtggaattgctgggtcatataatcactgtttagttttttgggacctgccaggcttttccggagtggctgcaccgttgtccattcccaccggcaatgcactagggttcctgttgccccacatttttgctatattgtcttttttattgtagtcaattgagtgggtgtaaagtggtcacaagttgttataggctaggtctacaccattgtactacgggttaatagcggataaggggagaatagacagtagatgctttagactcttgacccagacactgatgcatccagcaactgccgggggcatagcctgtgcctaggatggtataaagaacacaaacaggctctgatctttactggctctttgaggcagatcacctttctgactttattttctcatttacaaagtataaatactcacttcgcaggactaaagattttacctgcaaaatgtttggcgggcaccccttcagtgagcatctcctttccctgtgtcctacagagttaaggcagggctcaaagatgaatggtgaggaacgtgggatgtatcactgtaatacaaggtctgaggtgtgtcacccagaccctggagggaaggatctggaatacaggaccaggccagtgtccatgccagtggaagaagctagacatccgggccctcactgatcttcctctcctaagccgctgctggctgtccagctccagcctctgccgtagtcgttggattaatacccactcccagccacctactcagtgctctgagtcagacaggccttgccagcaaggagctcctggcccacggaaggggagtcagaagacaggtacatcctcatagcatgccaggtataacagagagggaagctccaggggctgtggagcttggagaaggccccattgcaacccaagggcccttggggagacttttggaagaggcgaggtctaaagggccacactcagtccaccctgttgcctgacctgagcctgcccctttccaggccatgccacagcccctcagcctgcagtgccccctgacagactgctcaccacccattgttctgagggcgtggtgggcatggcgccctcaccctgtttgagcctttcaacttggagagctgcagggtctgctggcctcccagggggtctttaccttgtgatatctcaccctgagaatccaaaagagatcctgaggcattgagctccactcctcaatccagtctccaactaacagatttcattttaaatcatcagaacagatcatgctgtggcacaggacactgtaggctcctattacgcctaagatattctccagaccccctgtctccgtggcctcccaggtccatttcctacccagtaccccctcaggctctgcctccaagccatcttgaccttattgcttaagcacacaggacacttccgtctcagggccttcacactggctgtttctgctacccggaacgcgttctttcttcactgcctgatataggtctttgctcatttcacctgagagagccttcccggcacccttatttaaagaaacacctcaccatcaccacctctttagcatgctttatttttatttatagcacttatcactagcagaaagttttatatattgtatatatacacgtgtgtatataaatctgtgtgtatgtatgtgagatagatagatagatatagatatgcttaagcagtgcctgagaaggcacatagtaaatacgtaatatgtatttattgattgcatatcatatcagagcatgctagttcacagacccagtagaataaacttccttgggtgcctgcagggtagagggcggtgccaggataggaatccaggcctcctgagccctggcccacaccctgtgcctggcctgcaaattctcttctttcctgaggcttagtcacagtccacttcattcccgccaacccctgataagtaggaatgaaaccagctacttgagaaggaaatcaccagatgtgaatgattatattattgggctttgatttttttcatctggaaatgggtcagcaaacattttctgtgaagggtcaaaaagcaaatattttaggctttgcatgccatagggcctctgctgcagctcctccgctttgctgtcctaacacacagcagccatagacaccatgtaaacaaatgagcagggctgtgtgccagtagagctttatttatgggcactgacatttggatttcacagagttttcaccaaattgtcgcaaaatattgttctgtttgtcttcaaccatttaaaaatgtaaaaaccacacacctagagtggtccagggcttgcttttgagtgctggcttctggacagcatggcccatgacacatgggttcagctcagggactagtccatgtgtcaggtccatagggggaaggagaggccatgtgcatattggtgatgggcaggcccagaggttctgcttcatccccagctggtcccttggtcacagctctgggtgtgtgggagggaagtacagtgtggggagatgggcatcacccaccatctggcacatccgtgacctagaagcagcaaagtacaaaatggtaattggaaaaggagtcaaaatacctgaatccagatccatcatggcctcctgccaacagtgtcggatgtggcaagttacctcctgagtgtaacagcatggcggattctgtaatcagacagaggggtttgacctctgcgttactacttagtcttgtgaccttggccatgttactctctgagcctgttttctcatttataaaatggcaatacgagcacccacttcataaatttttctgagaattaatgagatagtgcatatatactacataacacaatacttggcatgcagtaaattattcataaatattatctattgataatattttttaaaaaccagaaagacatcctgtgaagtgcttcgcaaataaaagagctccaacttcaagtgatgttaaggaatactgtgtatttccttcccttcctagaaggtgccaatgcatgctgatggctctgagaagccctgcaataatccgatttctcaggcttcttggatccgtgatgcttctacattgaacacctattaacatcttctaattctagtgttttgggggaaatgctgcagagcccgctttgggagatgctaactaagatcacctttgcagctctaaaatcctaattccctttcagaggactttagctgccccaccctgtttcacatgggactagaatcactttcctcttgtagaagcctccagaaattgcctgtgtttggtctactgttccttaaggacagaccagaatatgaagaatttaataaccgcagtgagtgccctgccaaaatgctgtagggcccaggcctcaacctcttgaatgtggtaagaacacagagtgcagttcccccagccagcagaccacagacactgccaaacccctgcattcctagttcccacactggcagaccccagccaccctccaactagtgtttacccagtgcctaatacgtgcaattagcattcttctggggggcacctatagtttagtggttccgtacacgggctctgccatgtgactgcccagcttcaaatcaagttactctacttccttaggattcagtttcctcatatgcaaaatgaggataatgactgtacctgggccaggcttggtggctcacgcttataatcccaacactttgggaggccaaggcaggaggagcattgagcctaagagttcaagaccagcctgggcaacatagggtgaacttgtctctacaaaaaataaaaaaattagccaggcatggtggcatgagcctgtcgtcctagctatttgggagcctgaagcaagaggatcccttgagcctgggagattgaggctgtagtgagccatgttcacaccactgcactccagcctgggtgccagagcaagatattttatttgtgtctctaaaataaagtaaaatagtaaaataaaacaacaggaaaccgcacctgtgtctgtgaggattaggtaccgctggacaaacagtagaccccaaacagcagccacagaaaaagctagagcttggtttctctctcacatgaaatggtggcaatccaggactttcatgctggttacccaaagtcttcagggatcccatctcctggtcttcaacaagtggcttctatcttcaaggtcacctcctgggccaggatagctgctggagcttcaggcatttcatcctcatcccaaatagcagcagaaagggagagaggaagagaacttgccctctttttaagtaactttcctggagacacaaccaaacttccacttatatctcattggctagaacttgttcacatggccacatctgaagccaaggaggccaggaaacgggcagtggtcctgtcacaaaggccaaggggagactggacgttggggtaggcaactagctgctctgccacacggagtgtgcccctggctcattccaataacagctaggtattatcattattaatattagctctgcagacctcggcaaagacaagaaaactgcctaggccttgtctgttggtgtaccatttattcagtaaacatgcatggcatctatatgtcagctctcttctagggctgggaatatagaagagatgtgggaagaggcagtatcttgtgatgaagagagtggggtctgaaatacagagcctgggttagagccccatgttggccactttctgtgtgatcctgagaaatggatgtaacttctgtgggctttgttgtctttgtctctaagatgaggaagatgataagaatgccatcacaggattattctcagggtgaaatgcattagtacaaataaagggctttgaatacttcgagggagaaggctctgattctttcaatggacccacgcagctgctccatgggtccgtggagcagcttgctttgcttttacaaagctttactttgctttcaccctgcccgccttaagtattcactgagcacgtactttgctaggtactggggattcacagatgaaatacatgtagatctgtatcccctaatcacacaaatgtttcctgagcctctgctatgtgcaaaactccatgcaccagatgacaatactgaaagagacttggcagagctgtggaggcaggtgtgggatatattaaggacataccttgagaacttttgttccaggcaagagggatctaaggggctaagagaggtgggtctggtcccagctgtgttggtgagaggtagcgtgtggacatctgtgttgcataattctggacaggcagcaaagcctgacctgtggatggggcctgggagaggaggacacccaattccagcacagaaaagtagtactgtattttcctgggtcatcaaatgagcagtaatctgggaacaaaagatgattagccatggatgcctgccgagctgagccagttgcttgcaccccggaacccagccagtgctctgctctcagggtcccaaactcgcttccctggactgtcctttgagactctcacacccactctccagccagctttggagaacagttaaaatagcaagttctgcccatctgtgtcagttccaagcactccttcaatatatgttctatggtaagcaacagaattccactaggcatggtttacagccctcactaggaggacgctggaaggacattgcaggaggaaaaggctccctacaatatcctgcatgggggaggggggaggcgtctgcagtggattcctaccctagccataggcccagaacacaatttctgtgcgactctgcagcctcagtctagtggtaacttttctacagcctcgtaaaaccaaagccctcatgtggcctgcacacagttgactgtggctggggtctcgcatccccagcagcagagcaagctcatgttcagccctgattgtctaaagacttcttgctcccactggtgcctggactcccactgcatgtccatgatgctgcgtgcccatgacagtggttgctgaaggccttgtctccttgaccacactctggagggcctactgctcacccagcagctccaggccagctccagcctgactacaccatcaaacttctccgctatccagtggctgaactacagcttttccaacaaagtccaaactccttccaagtttgcccttccttgggcatttatgaaaatactacagctaacatcatactaacggtagaagactgagtaacttccccctaacatcaggaataaggatgtccgcccttatcattcaacattgtactagcgtttctagccagtgccatcagtcaagaaataaagaaataaaaggcatgagattaagagaagtaaaactgtttttatttgcagatgacatcatcatctatgtagaaaatctaatgaaatctataaaaagctattagaactaagtgaatttggcaaggttgccagattcacgatccatatacaacaatcaattgtatttccatatgctagcaataaataatcaggaattgaaatggaaaaaataatacccatttaaaatatcatcaaaaagtatgaactacatatggataaatctggcaaaagaaatcaaagatttgcatggtctacaaaatattgctgggaaaattaaagaaatttaaataaatgaggagatataagtcgatcctcactattttgtatttgcaaattcacctactcactaaaatttatttgtaaccccaaaatctaaccacagggctgtagcagtcactcagagacatgtacaggcagcaaaaatgtgagtagccagatgctcacgttcccagctgaagtcatacaaggcaactccctgccttcttgattcaggtcttataactgttgacaaggatcctttccacagtctatttagtgccatgtttttcacatgtatgcttttcgctggtgactttaaactgtccctatatatagtgcccaagtgctgcctcatgttcccacatacaaggaggctgcagtgtgcctcatggagaagacacatgtgttaggaaagctccgttcaggggtgaattatggtgctgttggatgtgagctgaatgtggatgaatcaacagtggctactataggccaggcacggtgactcacgcctataatcccagcactttgggaggccgaggtgggtggatcacctgaggtcaggagtttgagaccagcctgaccaacatggtgaaaccccatctctactaataatacaaaacttagctgggcatggtggtgcacgcctgtaatcccagctactcaggaggctgaggtaggagaatcgcttgaacctgggaggtggaggctgcagtgagctaagatcatgccatcgcactcaaaaaaaaaaaaaaaagaaaatagctattacataaggtgcctttaaagagaaatgcacacaaagcaaggtaatgtattatcaatggacaagaatgttggagccagaggctcacaggaactgcactctgtacttcccctgggatcaatggttcagtatttgctaattcagtgttcgtggacactttacaaaacataactaccatgaataacaagaattaatcatagtttgttcgtgggccggaaaactcaaagtcattaagatggcaattctctctgaactcacctatagattcactggaatccccaccaaaatctcagcaggctctttttgtaggagtcgacaagctgattttaaaactcatataaaaaagtaaaggggcctaaaatggtcaaaacaactctaaaaaagaacagttagagggctaacactatctgatttgaagaagtattatgaagctacattaatcagaacagcatggtattggcataaagataggcatatagatcaacagacaagaatagtgagtccaaaattagatccacatgtatttagacaactgatttttgacaaagttacaaaggcagtgctgtggaaaaaggctagcgtttttaacaaatggtgctagaataaccagataactatatttaaaaaaataaactcaatatatgcctcacactgtatacaaaagttaaatcgaagtggatcaaagatttaaatataaaatgacaaaacttctaggagaaaacatacaagaaaatcccgatggcactggcagatatctcttagatgacagcaaaagcacaatttataaaagaacaaatggataaattgaaccacatcaaaatttaaaacttctgtatttcggccgggcgcagtggctcacgcctgtaatcccagcactttgagaggctgaggcaggcagatcacgaggtcaagagatcaagactatcctggacaacatggtgaaactccatctgtactaaaaatacaaaaattagctggtcgtggtggcacgtacctgtactcccagctactcaggaggctgaggcaggagagtcgcttgaacccaggaggcggaggttgcagtgagccgagatagtgccactgcactccagcttgaagacagagcaagactccatctcaaaaaaaaaaaaaaaaacctaaaaacttctgcatttcaagggacactgttaaaagaataaacagacaaaacagactgggagaaaatctttacaaagcatgtatttaataaagaatttgtatcaagaatataaagaactgtcaaaattgaataataataaaacacccccgcaagctggcaaaagatttgaatagacatgtcaccagagaccataagcatggcaaactgcacataaaaagatgctcaacatcatttgccatcaaggaaaattaaattgaaaagttttaaatttaaatttaattgttttatacttaagttgtaaacattttaaatttaaatttaaagatcaaattaggccgggcacagtgcctcacgcctgtaatcccagcactttgggaggccgagatgggtggatcacctgagggcaggaattgcagacaagcctggccaacatggtaaaaccccgcctctactaaaaatacaaaaattagctgggcgtggtggcatgcacctgtaaacccagctacccaggaggctgaggcaggagaattgctggaacctggcaggcagaggtttcagtgagccgagatcacaccactgcactctagcctgggtgacagagcaagactccgtctcaaaaaaaaaaaaaaaaaaaaatcaaattaaatctccaataaggtgctacttgctacacacctatgttggtaagtaggaggaagaactggaactcttatgccctgttggtaggatggaaaatggtattaccacttttgaaacacttcagcaatttcttaaaaattaaccataaactccagccatttcacttccaggtacttactcaaaagaaaaggaaatccatgttcatgcaaagacttagataagtacatctttatttataatagccccaaactggaaacaacccatctgtccatctgcatatcaatgcatggataaaagaattgtggtatatccacacagccaaatgctactcaagaacacaaaggaaaactaggcatacatgcagtaacatgggtgagtctcaaagtaacaatgctgagggagaggaactagacacaaagagtatgattttatttacataaaacgctaaaaaatgcaaaccaatctatagtaactgaaagcaagtcagtggttccttcaagatggtgaagggctgcaggggaatatgacaaagatacccgaggagggccgggggcagtggctcacgcctgtaatcccagcacttggggaggccgaggcctgtggatcccttgaggccaggagtttgagaccagcatgaccaaccaacatggtgaaaccccatctctactaaaaatacaaaaattagcggggcgtggtggcaggcgcctgtagtcccagctactagggaggctgaggcatgaaaatcagttgaacccaggaagcggaggttgcagtgagctgagatcgcaccactgcactccagcctgggcaacagagtgacagtctgtctcaaaacaaaacaaaaaaccaaagatacctgaggagaattagttgtgacgggtgtgttcactccctggaatacggtgacgatttcatgcgtgtacacatatgtcaaaacttattaagtcgtatattaaaatatgggcaattcattgtgtgtcaactatacctcaatcaaattgtttttaaaaagtaggaaggacataagagttcacctgaaggggcccctacctggaggccaaacttggaacaatttgagcgtcaaataagaacagtgatgataatggatttacaacacatcgaacaataataatagttttttaatctgtgtatgatgatactacgaaagcaggggagagggaagggagaggaaagctttacagaagaacatagaaaggataatgggaaaaatctctatttgcagctactaatgcaataattgattcaggcaaggcatcaatagctgctaaaatcactatgtgaaaattcgtgaggaaacaggtactcacatatctcaaatatcataattcatcacacagatgaattactatgtacaaaaggaaagattagctttataatggagagatcttcgggaacacattagtcaaatgatcacaccttagcattaccaatgatgagacaaactggcaggaggcccctccttatataacacaatgggagacacagcctcccctctgcagatctcgtgcccagaatgcttagccaagtctaatcacaaggaaacaatcagacacacccaaattgaggaacattctacaagacacctgggctgtctcttttacaaatgtcaatgtcatgaaaggaaaaaaaaggtgggggcgatggtacagtggggactattcattccagattagaccctaaaggaatgtaacaaccaaaggaagtgcctgatccttgatggaatcccgtactgaaaagaataaaagtaaaactgctataaaggacattatcgagacatttggggaactagaatatgagctgtatgaggacagccttgtaacaatgttaaacattttggttattctggtatttagttagtatttttgttgtgtgggagaatgccgcttgttgtagtattctgcttgatacacggatgcatgcccaagtttttaggggtgaagctttatgatatctctctcgctctctcccaccctgccctaccccagccacatacctgcctaccaagagaacagcacaaatgtggcaaaatgctaactagggaggcttggcgaagggtgtaagggtattcattgcatgattcttttaatttctctgtagtacaaaaatattcaaattaaaagctagagggcaggctgggcgtggcagctcacgcctgtaatcccaacactttgggagtccgaggcaggtggatcatttgagatctggagttcaagaccagcctggccaacatggtgaaaccccatctctactataaaaaaaaaaaaaacaaaaattagccgggcatggtggcagacatctataatcccagctactcaagaggctgtggcaggagaatcatttgaacccaggaggcggaggctacaatgagctgagatcgtgcctctgcactccagcctgggtgacagagtgagacatcatttaaataaataaataaaagctggaggggaaaggtaggggtggctggtccagaagggtccttccagctccaagagtcagctaccagctctgacctttgattgccagtacctgggcccctcctgcccacctggcagcatcttccttctcccagcagccatggtgctgtccatcctgccggacctggaccactgggagcaggaggtcacctcctcctgcccatagctcagaatgaaagcataggtgagttgcagaggagggagcaaatatggagaagtaatagatgggcaggctgcagatgggagggagcatggcctcaggaggtaggggacccccagatctgtttgtagatgagagacccacagctgccactctgtgcatgttgataggaccagacttgccctcaggtctgctggctggaagcctgcagtggtgtccatccctccgagtcctcaccatgcatacatcctctactctcctctcccctcactcacgccgttccagcctccccacacccccaccctgccctgagctgctgtgttatggcaaggacacacaggcctgccccagggcccctgcacttgttcactctcctgcactgcttccccctgcccctgccctgatgtctgcccagccacaccctcgcctctgtcttccttgctggctttgtttttgtttttctccagaggacacatcaccatgtgacatcccacctgcgtgtcatgcttcttgtctgtctctccccccacatgccaggggcatcatttttatccactgtgttcgctgccatatccccagcatctagtagggtgcagggtacatggtagatgctcagtaaagagtttgtgagtgaatgactccaaagccaggtttctgctttcccttggacagtggtgtctgtgtgtgaatgtgtgtgtgtgtgtgtgtgtgcgcgcgcgtgcacgtgtgtcagttgggcaggttggagggtgtccagccagctgggtcattcctctgggactcatttcctggggtgcaggcagagttctcagagggctgtgaggacgccacttgcagcatcaacacattacataatctggcactggacagcggtgaggggcaggcaaagcctttattctgtgtttgcccagagaaacttccccaggtcatgtcctaagctgccagctcttcagctttgtgctctctaattgccctgacagatcccaccacccattcacccggcccactggctctgaaagaagactgcatgggtgacgctcggagcttgggaggagcccaggccctggtatgttctggatgctgttgcctggggcctgagccccacccaggcagtgatgaccctgcgaggccgagcctctccatcctcccgtctgtacacgcgcagggctccaggtgctccctctggtgccgcctcgctgccttctgagctttcctgagcttggactcatggcctgagctgcccctgtgggcacaaccggatgcctcctcctacccacagagtggctcaggtagctcatcctctgtccacctgggactagcactgtcactgacctctcagagttatggggacacggtgcatgtcaggagtccagctccttctcaaaggtcagtgagtgacagctattgttgtagtcacagtccctgagggtccacagtgagcaaggccatgccagctcccggggcttcagaatcagccatccctccagtccctgctttgttggcacatggagcccggtacagggagatacatatacataaacaaacgtatacgtatacatcaggcagggagagctttgaagagagaagtcaggtcatgggatatggagggccaggccgtcagggcagcttccctgcagaggtgacagctgagcagaggcctgactggagttggggtgagccaggcggtggctgggagggggagcagcaggttcagaagccctgagtggagggttgggggcgtctaggccaggctggctgcagcagaggaagcaaggggaagaagggaagtcggaggtgtcagatcaggggctttgcagtcctttgcatggtccctggttttcctccaagtagggaggggtacttttgagggttttgagcagagtggcaggatctggcttccattttcaaagggtcccttggcttctatattaggaataaattgggatggagatggctgaagaagcaggcagatgggccaggaggagccccatgaactcggaagggctggaggttcttgggccaggctgtcagggtggagacgtgagaagtggccagagcctggagagctctgggagtggccaacaggttggccatgacaatagaatctaggcagtcctactccagagcctcaccctccacttgctgccccctgagcccagacgggactgtggaaaggtcaaggcctaaggagcataagaagtgactgacaaacgttagctccctcatcctggggaggaggggagaatggagtgtcaggagcacagctgttgactcttaacaccttctttgtgtcatgccctgatgtaccggttacacttctaatctccacagcaccccctgaaactgcacactgtggtcctcattttaaatagagaggaactgaggctcgatgagtggggaatgacttgaaccaagggctgctggctcagtcgaggcaccagcatgagggtcgtccttccctttctcagagacctcctttataaagaggctgtggttgaggccagggctcacctccaccccatcagcatctcaaactgttttctctagagtcacatagcactttcctctgagaagaggggcgcccatcacggttttccctaccctattgcagggccagtgacatctccacgccttttacccatctgtgccttcctgcttcccccaaatgtgcccatacctccacccacctgtccaagggtgcctcagctcaataggtgaaaggtggagctaacctcctctcccatctgcaccctccatcatactcctcctcctgtcccctggggacaaggacgcatatgcttctcccagcccttggcaggtactagcaactcactgcgggcatctgctctaggagctaggcacaatgggtaaccccattgtacagatgagaaaagcaaagcacacggatgttaacccacttgcctgaagtcagccagcaggtgactggcggagctgggatttgaacctaggcagtcctgctccagagcctgacccttcactcgctgcccactgagcccagatgggactgaggggaggtggaggcccaaggtgcataagaagtgcttgacaaatgttagctccctcgtcctggccttcagacaaaatactgcagcctggaaagcctcactgtgacacgattgcatgctgctaggtgtgttgttactgctcctattctaccgatgagaaaaccagtgctgctggaacatcagccaattccccacaatgaggaggagggaacctgagcccgacgcggaagcagcagacccagatgaagggagtcccttcagtgtctttcctatgtgaccatcaagcacgcgccagggaggcgtcaacccggtcgactgcagtccaggcgtgggagggaaagccaagtccgaggcctattttacacttttgagttttcctctggatgaaaaaagcagttcattagtgagatggccactgcgtcctgcgcctgaaacgtcggtagcagaggtaattgggggcctctgtctggcctctcagtccttgagaattttcaggtagattttagccgggagcactgaattctacttacaatgtaaaatgcgtctgtgaagtgttttctctgaagtgggagtaggtaattgattttttaaagaaagccaccttttggattccggaaaacactttcaggtccgtctcttatttttcagcacataaaggcaattatcccaggtcagcacttcccacaggaaatgggactctaattttgcacaacaaatgtttcactgttgcattttccttattgcaagagagattgttgtcccagcttgtttcacatcagagtgagaaaaaccaagccctgccttaaacagtggctgaggttagagattccacagggtttcgaaagccctctgtgtccaactcaccatgtgttgctggcagagccgctttcctgctccgtgccttagtttccccatttgtacagtagtgatcagcacagcaccacctctaataattcccagcagtggtacatggtaaaaatggtcacgcgatccctttcctctctctatgccctttggaaatctcttcctaccccgacaatggtcatggccacatgacttgctttggccaatggtgacaataacaaacataatgcaagctgaggcttggaagcaccgccgctctttggaacgctgagaccaccatgaatgagcctgagctagcctgttggagggtgagaggccacatgagacagcagtgagccctcccggctgcgccagacagatgcctgaggccatcctagatgagctggtctagaccggaagatccatggaatcgttagaaataattgcttattgtttttgtttgtttgtttgaaagggagtctcactctgttgcctaggcttaagtacagtggtgccatctcagcccattgaaacctctgcctcctgggttcaagagattctcctgcctcagcctcccaagtagcagggattacaggcacccgccaccacacccggctaatttttgtatttttagtagagactaggtttcaccatgttggccagtctggtcttgaactcctgacctcaggtgatctgcccacctgggcctcccaaagtgctaggattacaggcgtgagccaccgcacctggtctgcttattgttttaatccattaaacttaggggatgtttcgttgcacaataggagctgacacgtcccctcttgttcttgtacctgttagaatctttggttcttggaagaatggagaatttattgggagattattagggaacacagaattgaggcaaaggctggagaggcaggcttggaatcaggcaggaaccagaagagaagttacctgattgtcaggaccccaactatgggattagcatctccactaattctcccacccttcatcattccactcagacgataacgtcccatatggcgagatggtgaggtcacacatctcacttcggctgtatgagtgcagtgagaggcaggacctaaggaaaatgcactcacaagggagcaaaaaggcctggcacccccagagccagtcgatctcggttcaaatcccagtctgctacctgctagcaagtttccatttctctgagccttgctttttccctgaaagagagctgggagctgcatctgtgtctgggcgtaaggttatggtaaagattcaatgaaatatctatgtaaagtgcttagaacattagtacctggcattcagaaaacattcaataaatgttagtgttattgttattatttattattattaatttattctgcaggggaggggagaactataatttattttgggagatgtagcaaatccctaagactccacaggatgtggaaatcagggtactgttaggaaggggagtaggatactgggtgactaaagatgacaactgtcccctctagcggtgttatgaggctccaccttcatcattcctttcctgcgcacctactgtgtgccaagcctagtgcaggcgaggcagagacaggtgtcaacaagagggacttggtccctgctcccctggagcttgccttctagttggggagaggctggcgatgaataagtgaatcaataaatcacatggtcatttctgagtgcaccaagtccaagatgcatgagaaaaaaagggacgagatgctacttagggagtggaatggggatgaaagaagtctcatgatgccggtttaaaaggagtgattcagcatttagtagctgctgcacagtccctatcgaggagctggcagcacgtaagtcctctggacgtgttgtttccaatccccaagatggggagcaatgggaacccatggtggagagtggaggggtcagggatcctggctcccagttctttttttttttttttttttttttgagatggagtctcactctgtcactaggctggagtgccctggcaccatctcagctcactgcaacctccgcctcctgggttcaagcaattctcctgtctcagcctcctgagtagctgggactacaggtgcatgccaccgtgcccagctaatttgtgtatttttagtagaaacggggtttcatcatgttggccaggatggtctccatctcctgacctcatgatccacccgcctcggcctcccaaagtgctgggattacaggcgtgagccaccgcgcccagccggctcccagttcttattgtgcatcttgggcaagtcgcttcccctctgtgagcctgatttttcacgttgatgcaattaaggcaccgaatggatcatcaatttccccaaaacactttagcctttctttttttccttgtgagacccaaataaaatagatgaagatgaggagggcataccagagtgtcacttgcgagatcagcgtctcttttaccttccctccgaggccctgagacacttctgcagacacctgagcctccaaggagtcccgcctggaaatcacaagggtacataaaggatgctacagtcatcttggaatagacagacctggctggaatcctagctttgccccttacttgctgcatgaccgtgagtcagtcccttgacctctctgagctgtctgcatcaccttgccagtggggattggaattaggagatcagatctatgttcaacagcccatgttgtaccactgatttgctctgtgtcttgctgagcccctccccttctctgggccccaaacctggtgacagattgggatttccagcctctcctggatcatctctaaaaggggcatggcaggccgggcgcggtggctcacgcctgtaatcccagcactttgggaggccgaggcaggcagatcacgaggtcaggagatcaagaccatcctggctaacacggtgaaatcctgtctctacgaaaaaatagaaaaaattagccgggcgtggtggcgggcgcctgtagtcccagttacttgggaggctgaggcaggagaatggcatgaacccgggaggcagagcttgcagtgagccgagatcacgccactgcactccagcctgggcgataaagcgagactccatctcaaaaaaaataaaaataaataaaaaaataaaaggggcatatggcaacttatggatttcccaaaccagagcccaaggtatgcttctcctcccacaggactcgatcgaggcaaggaatccaggagcactggcagcccccatagcccagaaatagcaagccagttggtgggcagctgaccttggggctcggggcctgagctgaggcctgttgcttggcaacagccagcatcacacaccgtgggcagcaagggctctggtggtgacccacgcctccagcccagcccagatctgcctgggtgctggagagggccggcgagtgtccttggaggcttggaagaaaagcttccgtctgcaggagcacttgcatgtggtcctgccgacctccagctttctagaagggccggcgactgtgtagttattattatctttaatcctgatgagaactccgcaaataaggtcatcctgccctctttataggtcagggaaccgagacagcctggtgaatgtcttgccaggatcaggtgttgattctgcagcacagcccctccactgtggctggaagaggggtggagggtctgtagctcctaggtagggttcagaatgggttcagtgggaattggaaggtaagcagaaggtgattagaaacagcgtttgtgggcctgataccccctgagtcctcctcatatgaggactgcaagtccaggggtccagggtgtgaccgcaatggtggtggtggtcccaggggtgacgttttcaaggccccgagctccttgcagtgggatgagcctgcatggcacatgggccctggcttggggaggcaggccctttggtgaaccggctcaggatcatgggccgggaagcactaagcctctggatactgactatctcttcagacaccaccacatccaacaccacgacaacccggcttggatccttacggagtgcttcagagcactgaaccaaaacccctgcactgtgtattgcacaaacctcaggctcaagcctgcacatctctgcttgctgtctgtgggggatgcttcacaaacgagttcccctttctgggtgttatgagaatttttcatgagatatctatcctccttctgtttttttttttttaattatactttaagttctagggtacatgtgcacaacgtgcaggtttgttacatatgtatacatgcgccatgttggtgtgctgcacccattaacttgtcatttacattaggtatatatctcctaacgctatccctccctgctccacccaccccacaacaggccccggtgtgtgatgttccccttcctgtgaccaagtgttctcatcgttcaattcccacctgagtgagaacatgcggtgtttggttttttgtccttgcgatagtttgctgagaatgatggtttccagcttcatccatgtccctacaaaagacatgaactcatccttttttatggctgcatagtattccatggtgtatatgtgccacattttcttaatccagtctatcattgatggacacttgggttggttccaagtctttgctattgtgaatagtgccgcagtaaacatacgtgttcatgtgtctttatagcagcatgattctccttctgttattatttgtattattccacagttgaggccactgagactcagagatgttaagtgacttactcaagctcacacagctggaaagggcagggctgagattcaaggttatttattccagttatctattgctgcataacaaacccataacataatgactaacacaggaacacatactgtgtgcataaatgtacagtttgggtagggcttggcagagagctcatctctgctcctcttggcattagctgggcatggagttttctgaaggctcattcaccatgtgttggatgagtggtctcgctgtcccctgcaaccttagctgagtgcctctccatagggtctggattccttcctcacaacatgctacctgtctccagagccagcattctccctcccatcaaggattgaatgagtcaagaataaagcattaagccaggggcagtgtttcacacctgtactttgggaggctaagacaggaggatcgcttgagcccgggagttcgagaccagcccaggcaacataatgagaccctgtctctaacaacagcaacagcaaaatagccacagtgagctatgattgcaaggcaagcaggcaggcaggcaatcaggcagacaggcaggcaggaaagaaggaaggaagggagggagggagggaggaagggcaggcaaagagctgtctggaactgaaaagtccccgtataggatccaagcagaatgttctgttcctgagccctgcagggccctggtaagcctggaggttaggatggaaccagctgtttccagaacctccctccaaaaaagaggaggatggagaagggactggccctggaagtcctgaactggtcaggtcagggagccaaaccgtagaggtttcaggcagaaatgagcctttcaaatgccagactgcccctgatacagctgttcctcttagaagtcttggttcaggccaagaaccaggagctgccctgcttccgcctctcgcccccactgtcaacagtgccacctcccaaatgtgctgcgtccacacacttcctcagcccccatggtcacaccgcaactctggcctggactggtgcagtagcctcctcactgtcactggcccaattctaacacattcccactcagcagccagagatcttttgaaagtgtaaatcaaacatcacatcgcatcacttggctgttcaaacatctgaggacttcttgtccttagaattaaattcgaagacaagaaacaaaaacagcctgggcacggtggctcacacctgtaatcccagcacgttgggaggccgaggcaggtggatcactggagatcaggagtttgagaccagcgtggccaacatgatgaaaccccgtctctactaaaaatacaaaaaattagccgggcgtgatggtgtgctcctgtaatcccagctactcgggaggcagaggcaggagaatcgcttgaacctgggagatggaggttgcagcaagccgagattgcaccactgcactccagcctgggtgacagagtgagagtctgaaagagagagagagagagaagagaaagaaggaaggaaggaaggagagagagagagaaagagaaaagaaagaaaggaaggaagaaagaaagaaagagaaaaagaaagaaagaaagaaagaaaaagaaaaagaaagaaaggagaaaggagaaaggaaagaaagaaattaaaaagaaagaaaagagaattaaattcgaactcttcaaactcaaactcctacaagacagcactgcatctcaccttgccctccctgctccctctgcctggaaccatctcccacatttatctgtgcttggctggtttcctcttgtccttctggtctcagtatggaggttgcctccttggagaggtgctctgaccacgtggttcaaatcagtcccgacccccaccttagatctttattatctggtgacatcactttatttatttatttatttatttatttatttatttatttatttatttacttgcttttttctttgctcccctctactgagctctggtctcttgagctggtcccaagtatcagagtcagggcttggcacagagtagacacacaataagccgagtgagagtctaatgaacacacacacacctcccttggagcgctctcactcgtgtccactcaatcatatgctgagaccctctgccacacttgcaaacacagacacacacttctccacccctggacacgtcctgcgcgggagctccgagatgcgtgagcgcctgtaaccagggatgctgccgccccctcctggaaagattgggaaagtacagccagagtctttctgggaaaccactccaatgctaacctcaggctaatcctaactccccttccttgcagacagctgtccctgcccaggcagggtcttcagatcatttctgatatttggcctagggcctgggctgtatgttcttaccaggtgcggaggaaggaaggaaggaagggagggaggggaggggaggggaggggaggaaactgacgcaggtaagagcattcacctctttccctctccaaggctcagtttcaggatcattgtcacaggtctgacacgaatcatgtgcaataattttttgtacattcataggtttggaacacggtataaagggccttgaatgccagaatgaagccttgggttttatcctgcagtcgttgggagccactaagagtttctgagcaagagagggacaggatccgaactgtgctttggaaagatgaaccagccggtgtgcattcatgcattcactcattcgttcattcattcattcatctgaccaaaatgtgctttaaacatcttttgcatgccgggccctgggaatgcagcagtgaccagaggtgctgttggacttcatggagctcatggcctcgagtgacatgtgtgggagtggacatttggacacagaggaggcatcaccccagtcctaggcaaggtgagccctggggcaacataaggctcacataggcgccttagcttctgccctgtatgtagacagagcagggtgggagtcaactaagccactgatttaagtacagaccctgggacaggggcaagcctgttggtcctcagctcccatcctaggtcatgagaggccaacttgaccaacgcaggaggtgtatctgttcattcccctccccaatcaaatagatgcaaataacatgcaagaggtccgaatttaaagtatgttagtgttaaataaatgtattatggtctgcctggcgcaattatagtcaaactcaacatgtaggatgtgacccacatgaaatactgaaccgattttagtatcagacagcatactcactttggagacgagaagaggcagaggcccagggacacaccatatggagagatgcacacacgggcaggtgttcatgaatttactgcattcaggaggtgagaagaaaaaagagacagatttcattttcagctctggctggagttacggtccttcctttgaaggaacatggatgaggagctagaagtcctaggtactagtccccaccacagccacttggtagctgtgtcaattctaactggccactgtattctcatctgtacaatgggtccaatgacagggaagcatgaaggagaccatggaggtgtcttaggttgggatctccagaagttgaccctgaaccaaggattcctgtgaaaatgacttactgtgtgtgaagtatttccaggaacagctagaggaaggggaagcaggcagggccagcaagaccatgccccaccaggtctgtcctgcaaaggaggtggcataagtcatacctcagagttggcccatttggggggcaagggagctggggtattcatactcctgtgctcattggtaattagagggagtaaattcccctctggaggacatacctttccaggcacttccagctctccatacgtacaggcaaagctgggtcgagcaggctacgaactgtcctctgaaagacacaggtgctggctgctgggagtgagagcatcctgggagctgctgtacacagtatgggacccaagggatggtctactgtaggacgggaagtgctttgtaaactgtgaagtgtggtactgggattgaggagggtcctcatctgggacttcctgcagctcactgatccgtctcagccaagttgtctttcctcgtgggtctatttcttcctgggcaattgaaggcaacaacacacacggattgtcatgggtggaggggtgtggtgaaatggtaactactctggtggtgaggctgtggagaggcgtgcacctttatgcactgctggtgggagtgtaaattggcgtaacgttctatggaaggcaatgtggcaatgtctatcaaattacaaattcacaaatccttcaacccagcaattgtatttataggattttgtcctacaatagatactcacacacatgaaacaacatgacaagcttatccgctgcaactctgtaattgcaaataaattaaaacaattattgaataaattatatacactcatgaaatggaatatcctacaacaataataacaataaaaaggagaatgaggaagtggcctctgtattgttactggatgatctccaagccccatagttaagttacaaaaaagcaagataaagaactacatatgatatttctttaacaaattcttctatagccaagtattgtcttaggtgctttacaaatatgaatccacttagtcctcctgacactcctgagataaatattattatgtccattttacagatgtgaaaactgaggcacacaggttaagtaattttttaaaaaacaggtgtgcaccaccatgcctagctaattaaaaaacatatatatatatattttgtacatatgggatcttgctatgttgccagagcaggtcttgaactcctgggcttaagccgtcctcctgccttggcctcccaaagtgttggaattacaggcgtgagccaccacacccagcaggtttagtaattagatgaaggtcaggaagctagtaaatggcaaaactaggatttgaagaggaaggggctccaggagctgtgttttttgtttcagctttattattattattattattttgaaagttttgggggaacaggtggtatttggttacatgaagaagttctttagttgtgatttctgagattttggtgcacccatcacccgagcagcgtatactgtacccagtggttagtcgtttgtccctcacccctcccacccttccccgagtccccatagtccattgtatcattcttatccctttctgtcctcacagcttagcccccacttatcagtgagaagatacaatgtttggttttccattcctgagttgctttacttacaataatggtatccagctccatccaggttgctgcaaaggacctgtgcctttgtgttactaggttgtatttcctctctgtagctgaagattactcctaactaatcataactccatttcccagtgattggtttggcagtgattggtttgaggagggaacacagcccaattctggccaatgagatatgaggggatgtctgctagggaacttccaggcaagattttctcactgatgaaaagggatgtccggggagtccatctcctctgcttcttgaagtcatggtgaagctgtggatggagcagccacctagtgattgggagagtccaagcctgaagtcagaggcccacacactgaggatggaggaatgggaagacaggcataacctgggaccctatagtcattgggccactgagataaccaaccctgggcgtcttgatttgtgtgatgatagacatctttactgcttaaggcagtggatctcaaactggagtgggcattaacatcacctgttaaagcacaggtggttgaactccacccccagaatttctgattcagtaggtaaagccaagaactggcctttctaacaaggtgatgctgatgccagctggtctgggaaccacacttggaaaaccatcagtataaagcattttaagttagagttttcgttcattaacaaaggaagcggccaggcatggtagagctcacctgtaatttacatgcagctgctctggaggccgaggcagaaggattgcttgagcccaggagtttgaagccagcttgggcaacatagagagacccccatctttaattatgtaaaaagccagaggcatcctgtgaccttgagtgacgtgcctttcaaatcctctggagtaaggggtgccaggggttgggagtcagagccccagagcaggggccaggagcccagggttctccaaccctccttgtgaccttgtgcaattcatttcttctctgcagggtctgctcccatctgtcatgggaaggaggtcagatgagaccacagctaactttccttctggctccaacactctgtgttccaggattctccagaatggaacagtctgaccttggggattctagcaggatcaagtcaggtccccttcatcatcccctctctccctctcatgccccgggaggcttccactcctgcagcatcaggcactgggaggcagagtccagctccacagtcatttttaacatattaaagttctggacagaaagctcatttgaagcctgtgtttgtgccgggagaagagaggccagagccaagcctctccccacgggggtttcatctcccccggcttgagcagaaatgtgtcgtcacaagcaagcatccaaaaggcacggtgcccacgcctgcgggaccactccactccctaggggttctgaatatgaagtctaaacagactttggcagtttcttcctctgtattcaatcagcctccgagtactctctttcaccccctaagtgtcattcaaatctgccaggctcactatctctttgcctcagattcttggaacaggctcagacaggtctcgctgccacggtcttgccccctgtgccctcctgccccactcttaacacgtgatatggcctttggataaagtctagactcctgagcatgggagacccacaatgcccttcagtgtggcccctgccaccttctctggcaccccataccctctgtgctccaaccgaaccaaagtactacagtttctggaacatactgggctccctttcatctctgagcctctacacatgctgtgtctccttcatggaacacagagctctgcagcctacctgccttcatgcagcacccccggtctcagtggggatatcattccaggcaggaccagatacatgatttgtgggacttagtgcaaaatgaaaaagttcaaaaataattaggaatttcaagatggcaacagcaaagcattaaaccaagtttagaggccggctgtggtggcgaatgcctgtaatcccagctacccaggaggctgaggcaggagaatcgcttgaacccaggaggcggaggttgcagtgagccgagatcacgccactgcactccagcctgggtgacagagtgagactccatctcaaaaaaataaaaataaaaataaaaaaatacaccaagtttagggcccttccaagggcagggcctgaccacacaggtcacatgcccacaaagccagccctgctccaggctatcaccccagagtgtccactggggcctcctctgtgcccccacagccctctgtgtgtcattatctcagtactgatggcctgcagtgggtttgtctatttttctcctcccactagacgatgagtaccagggggtaggactcccttctgtcttgttccaggtatgtcctggatgcctggcatagagctggcaaagtaggcacttcagaactatttgttgaattgccattcagtgtgtaaacaatctgttcaacaaatgtttttccagagcctctgatgtgccaggcacaatcctaggtacttggactacatcagtggaccagagtccctcgctcctaagcgtgtacattccagcagggaagacacacagtgcacgctttgcagtgggttctctcagaagcaggccctgagttaggatttgagcataagtagattgtttgagagagacaggaagcacctggttctcaggccttcagactcagattggaactaaccacgccaccagttttcctgggcctcctccagcttgcaaacagcagatagcgggacttgtccgcctccataatcacgtgagccaatccctcgtaataaatcattttctatctatgtctatgtgtagatatccctttgcttctgtttctctggagaacattgatgactacacggctggcgactcacctgcggagcgaggggaatggtggtatctatccagcaccttttgttctttagtggccaagggctgctcccagggccctcagctcctgggcacttctgggctggcccgtgcaggctgagcagctcctgcagctggaggaagtcctcaggcagagtcagtggtgctgccgtgagcagctatgagcggagagaagggtggaagggccctgagggatgcaggagtgccagaaatacactaaaaatgaagtgggtcctagtgagagctgtaagtggagcacagtgaagggggctgggtgtgcatgtggagagaggtctcagaatgcacttgacctggaactgacctctcagacctcagtccacccacaggtcttggcagcagccggtgcccccgacactcagtccctaacctacctgcactcctgccccacctcagcccttggtctcatgccatggtattttccttttagcctttaattctagccataaattacaatttcacagacaccaatggcatgagagatgaggacccagattgccagagacttttaatttgctgtcaacagtccctccactggccctgccaatctaggagagctccatctacccctccctcgggcctgatgacctggagcagcctcctactgtcccgatgtggaggagggtgctaaccgcggtgatgtcagcggagcctcagcttccacagagggtacgcatgcctgggacacagagaccggctgccccagtgaaatcacatttgtcttgattttgccttgatctgcagccctcgcataaaaacaggattctgaggttcagcacagctgatgcacaaggccgggttctaatttgcttctgtgaggactgagtcgcccactttgagccggaacagcccccctcccactgccccacacaatcacttgcaaaaggagaatgatgcacgctcacctggacagtacgtagcacacatacctgattgtttcctaagtcttttcacatctatgatcttgtttgccccccaaaccagcctacggctttagtggaagaagtgttgatattcctgtctcagaaatcaggaaacagacattcaggccattaagacaaggttgcccagctagtaagtgttgggtaagtctagaacccaaatttcctaagcctttattcaatgccttctccatgacaccaagctgtgtctgccttccacgagccctctagtagggataagatcttggagaagcagtttttaaatattttttaattgaaatataacatagatcataaacatacagctctatgaatttcacagaatgaacatacccatatatccagcatccaacatccaggccaagaaacagaccatgtcctccagaagcttggccaccacccatcactattcatgggcaagtacttttacttccagttttgccttttagccacatctttatccccagggtataacccttcaagaatttccattcttggtgggggaagagcaaaaccgtttctgagtggacatagtttaatgatcaaagctctaggctgcgagtcaggaggctgagttctcttgtgacttggctccaaactcactgtgtgactctgggcatgtcatctgtcttccctggacctcagtttccccatcaaaaaaacctcagtgatttcctccggcctctctgcttagaactggagctggaacccctctttgtgggcctgaagttttagtttcctatgggaccccagctttctgcagcagctgacggcctaagcacagtccatactgacccctagtaactggcctgtatggtctctgtggggctgggcgcagcatatgcttgtcccctttggaagttgctaatagaagtccctaatgggtgtgtgttctgtttaggatgagaacggctaatgcctttttggaatggaccagtcccccataattgccaatacctgtaaacttttcctgagtgcttactgtatcctaggaactctgctaagggctctacgtacatatctcgtttcatctcccaacactctgatgaatagatattattcttatctcttgtgtataagctagggacccctttgcaagtaaaagagtgccttctttaaaacaggacatttaactgtataatcatataatgaagtctgaaggaggcctgttctacgttgttgcaacagctcaagaaaggtgtcatctctggccagactttttctgtttttctactaaccatccttgtctgttgtgctagattgcaaatggccccatcaaaacatagagtctatttctccaccttctgaacccaggctggctatgtgactgtctttgatcagtagaatgcaatggaagtgagagtgtaaatgttctaagcctgggcctccactcttgtcctcttgaggtgttgctgccgtgtgaacaagcctgggtcaacctccacctcacggagggagactcagccattccattggacaccccagacataaaaagaatcccaggcaataccatgtggagcagagataagtcatcccaactgaatccagcccaaatttctgacccacagaatcctaagcaataaatgttattttaagcgactacatttcagaatattttgtttgcaaaagctagctgatacagctgtgttggctttttgtcctcaggtttgttgtctgtctcatggttgcaaaatagctgctgtcatttcataaaaccaaagtcaaagaaggaagaaggggatggattaaaaaggaagtgttttcttgcaatgctcctcaattttatcaggaataattttttttttttgagactgagtcttgctctgtcacccaagctggagtgcagtggtgccaattcagctcactgcagcctctgcctcctggggttcaagtgattctcctgcttcagtctccagagtagctgggactacgggcatgcaccacttcacccagctaatttttgtattttttaagtagagacggggtttcactatgttggccaggctggtctcaaactcctgacctcaagtgatccactggtctcggcctcccaaagtgctggggttacaggcctgagccaccaggcccagccgaaatgaaattcttaatagcctgcatgctcccagataactcactggagcttggttttaagctcactaggctgtcatatttaagcaatgtgaccccattcctccctccatagctgattagatccttgatcctggctgaaccaatctctttcctgggaatattgatttgggacaaagagcttagtttgggttggtctcttgaatgcaggaactattatataaaagcattgcagctcttggtggttgcggcagagacgcagagaaagccagtttgcattgaaggaagggtacagcagaatgaagtgagtgacagtctcttgcaggacttctgggtcccaggtctgggctctacctttgtccttggagcatcaggaaaaacagctgtgtcactgtatactttcttcccttaagctaaagttgggtgggggttggggggcaaggtctctgttatttgcaacaaaaaatcctaactcttgtaatgggattctctaagactcagggttgaaactcaaaggcaaatgggctcaaagtcaggcaggtccgggtgcaggggggaccttctcacacctaccccaggatttctgagaaatctggtgagatgatgggcatagaagccttgtgtgagattttatatgaactcatactcatttatacatgctcactgcacataaaaagaagatgaaactctccacctcaggatgtatatacataaagaaggtcatggtgaaggagagggtgtgataagacttatgattggctgagctttgtctcaggtatcaaagtcccaagactttatgattggctgttactcatttgctttcttttctttggctgaaggagcacagggtggtgatagtggagaggatggagcagaatgagagacattggaagggactcagtgtggaacagaaacaccacttgggaaagcaggtgcccaaagctggaactgacattgaaggcatcagccatcttcctacccaaccctggaaactcaaggataccttgaggaaatctttaacagccgagtgttctagccaatcatatttagatctcaagaggcaaggaggccccagctcacacaggggttggatgagaacatagaagattgcaactcgaagcactaatccctgagtacagctgcagcagcatctgaagaaggctgaggtagacatacccaggaagagacatgaatcacaattgctcaaagctagctaagggtggccttttgacccacttctggctaacgaaacgtaaggaaaagtctgccacgttggatgtagggtgagggtgggggttctcgaagtgtttttttcccccttctgtcttgaacacaggcacgatggttggtgtggtggcagccatctctttaccatgagtgaaaggtcaagagaatcagagtcatgtctcctaacatagttgagctgctgaaccaaaactagcagccatctgcctctggcctcttatattggaaaaacgaacctctattggtttagaaccaatacagttagcttttctgtttcttgcattgaacacatttctaacaggtatagaggtggatgaaggaaaatgctcccaaaggacttggttttactcatgtttgagaattaaagacaaattcacaggacaatttaatcagatgcctggaatcacaggctgagctctagccccggtagagaatagaaaagaactgccaagtctcattaccgaaggcacaaaacagccctccagtgaagcatcaaagttaatagtgtatctcaatctcatccactggcaaatccaaggcagaaaaatgactccagtgatggatgccaccacatcagctgttagcttgctatggttttagtcccttaatcaccaacagcttcaggatcccactggagagatgggtgatcaagcacgaggtgagacagctgagaaggggtgcaatgcctctagtttgcaggaaccagagtaggcattcatgggcaagaagaatccaccaagagcaggtaactactgtccctatcttatatgtataagaaaacagacaagatgagagttttaggagctttgtttgtgtttaaattgattattcatcaaacacttattaagtacctgctgtataccaggtcctatgctgggtgtcagggagatgccctgagttcagtgaggacagtaaactgtgaaagcaaataactacaacatcaaccaaagggatcctgggagtcttgtcagaggaagaaaatgcactggtgtcttggggagggaaataacttggactctgcgttgctggtggatgggaagaagtgactcagttcagctcctcaattacttttgggacatgcatgatgtgagcatacaaaactaaaaggagaaagagggaaagaatgggcttagccatgaggacagggactctgctcccgattggtccctagcacctataacatgctaaatgaacacactgattaggcatgtacagtactgcagaggcactatgctgggtaccttaggtatatgggtggaggagttattgccatttttcggaagagaactgcgacccagagaggagaagtattgatcaagccctcacagcgagtgagtgctaagtcaggatttgaactagtttatgtctaaatccaaatccaggctcaatccgttgcactctgctggatccttctactagtcaggacatgttcagaaaattcaactaaaatggaattaaacaggaaaggagatttataggaccatgtaaccaaagagcctaggtgtaggttcaggtaaaggttgatgacatcaaatggtgtcaccaggggcccatttcctttggctctcacagcattgtattgcttcttcctctggctctacatttgcaccatcataaaataggccttggttctcctgggcagatgatggttctcctgttctagacctcgtatcgtctacagtattgactaagggaagagaaaaggcatgcgttggtaggctttatagggggaaaaaaaacttcacctttccagaaatcctggcattttcttatatctcattggctccagtgagtcatgggcccatccctgaaacatcagtttacgactcctgaggatgacttttatacatggataaaactatttttgattactttagatttaatattaaatgtattaaggttagaaattattagttctaagaaaattctagttcttaaacttttaaatccagcttataaatcttactttttaacctctagatctagtaaactttaataaccaagtttaaggaagcctttgcaattaacttaaacatttttaactgtattaataaatttaatataattggttttctttttaggtactttaattatctgactaataacctgttatttatttatttatttatttatttatttatttatttatttattttgagatggagtctcgctttgtcatccaggctggaatgcagtggcgcgatctcagctcactgcatcctctgcctcccgggttcagtcctgagtagctgggattacaggtacgtgccaccacgcccagctaatttttgtattttttagtagagatggggtttcgccttgattggccaggctggtcttgaactcctgacctcaggtgatccacccaccttggcctcccagagtgctgggattacaggcatgagccaccaggcccagcccaaaaccttttagatatttaaataacgcttgtaatatattgacccttaagccttcttaaatgtaccaaatcagtttacacacttaacaaaattgcttatactttttaatgtaaaatcataaatctaaaccaattactcaattacacatttcaattaaaataatgaattaatctcttagatactccaatatgccccaaaatcttaaatattacaagtactaaaaaaatactagacatgaacaaattatttctgaaccaaacataaaaaattcaagttgtggatatgatttattcattgtttctgtgaacaatactaaaacattttggaattagactcttccccacttcaaaaacatttacagcatccttggcaagacagtgtccttgtcacagagcaaagcatacagatagacttgtgaaagattgggctgtacccaaaacatgattcagggctaagctgctgttgagacatgctgaaacgtacttagagttgccacaacagggaccccataaattctacagaggttgtagcaaagtagtactgaggggtaagaggcaatgcttcagtcacataagctattgtagcccatcataaggactttagccctgagtaagaagggaaatctttgaggattttgagtagagaagtgatattctcctgatattaaggttggacataaggcccaattcttaccaatgagttgtgagaggaattgtgcctgaaggtttctgagaaaggttttttcaatcttaaaaagaaatatgagaaagcaatctcctaacacacactgttttattttactctagatattgtctcatgaagatatgatacctggagccatggcagtagttttatgactatgaggaagttagatgaaaacaatctgacactaaatacaacaaagatgaaacttttaaagaacagctttattgacatataattcacataccatatgatagacctacttcgatggttttaagtgtattcacaaagttgtgcgaccattactccagacaattttagaatattttcatcactacggaaataatttaccattaacagtagcttgccacttcctctcaacttccccaaccctaggcagccattaaattgctttctgtctgcatagatttgcctattttgaacattttgtataatggaatcatatgacatgtggccttttcttgctggcttctttcgcttagcataatattttcaagttcatccatgttgaagcttatatcagtatttcattcctttttattgctaaataagattccattgtatgggtatatcacattttatttatccattaatcacttgatggactttcaggttgttcccacttatttaggattccaggtttatctcttaaattgttttctaaatttcatttttagattgtttgttgctggcatatagaaatacaattgatttttgtatatttaccttgtatcctgcatagttgctgacttgttcatttattataatagttttgagtgatttttaaaggttttctctatacaaaattatgtcatgtttagtaaaaatagttttacttcttcctctccaagttaaatgtctgtatttatttttcttgcctgttttttctggttataacctccagaatagaagtggcaaatatcctgcgttagtttgctaaggataaaacaaacacaaaaaacaacaaaaaaagaagtggcaaatagaagtgttgagaatggacatctttttcttgttcttgatcttaaggggaaagtattcagtttttcatcattatgaatgatggtaaatgtgggtttttgatagaggccctttatcaagttgagaaaattcttttgtgtttctagcttgttgatgttttaaaatcatagaagtgttgtattttcccaaatgcttttctgcctctgttgaaatgaccatgttgtttttctcctttgttctattaatattgtatattacatgaattgatttttggatgttaaaccagccttgcattcctgggataaatcccacttggttgtggtttataatactttctatatgttgctagacttgatttacaggaattttgttgaagattattgcatctatatttatgagagatattgatctgtaactttcttgtaatgtctttgcctgattttagtatcagggtaatattggtttcataggagttgggaagtgttctctctttctatatttttttgaagagtttgtgagagattgatgttaattcttccttaaacatttgatagagtttaccaagccatctgagccagaacttttctttgtgataagttttctgattcagtatctttacttgttatagatctatcagattttctattttttcttgagacggttttgatggttgtttctttttaggagtctgtgtgtttcatctagtttacctaatttgttggtatataattgttaacaatattcctttttagattttgtaatgtcccccctttgattcctcattttagtaatgtgagtttttctctctcttttttgttttttgatcaatctagctaaaagtttatcaatgctgttcatctttccaagaactagtttgggttttgttgggtttttctctattgtttttctgtctatttcacttctttctactctatatttactatttctttcatttagctttagtttgctcttctttttcttgtttcttaaagtggaacatggggctgttgatttgaggtttttcttctttttgaatatacatgttaacagctataaatttcaatctgagtgctgctttagagtgttttgttgcttttccacatatttatataattctttgcatgtctcacaattttttttttacctttcctatggtactgaacaatttttttgaaaagtggacattttagataatatgttgtagcaactctgaataccagttctccatgctcccacagatttgttgtttgcttgtttatttggttagtaactttgctagagcaatccagcactctttctatgtattcaatatttctcccaatatgaaaggacaagagaaataaagctttcttccataataaatattctttttatatttcaggaaagtctatttccctcacagggtgcagcatctgatgttgttcctcaaagagctcagccttgggcatgagcacagcctctctaggatgccactggttttagcagggctctctttgactgtctttttcctttatctctgttatgctgtctgcctctgttggtatcatacctagatattagcttctaccaattgatggttgattgttctattgtttttgacagtgctgtgaggcaaaaattgctctacaataggattctgtgatatttgggcccctttacaggggtagtctttaaggccagtttttgagtcttgttctgatcccaaagagcttttcttaactgtctctttccctgattattcgtgttaaactactagatggtttaggtttagcttctttttttcaagaagctacttgtctcctcgtaatttcttaccaccaaaagatccattgtttaattaccaccagttacctctccttgccccacattcatattttgttcatatcatttgatttgaacttccctctacactctgttcacaataaagcctgttcccctaggggagaacattgaagctctctgttctgaaggcctctctctccctctagacaaaatctctacaccactgcttcagagctaggggtaaagacagcagcctcttcctcttgcagcaatatccagactttacaagtagtgtgcttgtggtggtggttgtctctggtctgctcagtttgcctctctcagtgcagaacttctcccttatgagcaacatgaaacgagggcaatcagggtcccagtattctcagactgacaagtctcgggtagagctcctaccctgtgagtgagcggggactgggtagagaaaggaactccagatctctcagctgctcttgcctggaatttagcttctacaacatagagctaggggaataagtgtttctggtaacctgcaatattcctgccctctgggggaagaggaaatcctatgttcttgtctgcacccacctgtggcagagcttcatcgtgctgagctgggggaagcggaaaggaacaggctatggctcagataccccagatgcatgctattcttaccatgaaatgtttctttatttgctatatgcctttcttcttcttctttttttttttttcctagagtgagtgatagagtgatggagtctcactctgtcgcccaggctggaatgcagtggcatgatctcggctcactgcaacctccgcctcccaggttcaagagattctcctgcctcagcctcccaagtagctgagattacacaggtgtgtgccaccacacccagctaatttttgtatttttagtagagatggggtttcaccatgttggtcagtctggtctcaaactcttgacctcacgtaatctgcctgcctcggcctcccacagtgctgggattacaggcatgagccaccgtgcctgctctatttgctatatatctttaagacagtttccagagactataaatgcttctttttaaaaataatttttacaaggtacagtttttttcaccagggaaatatctacacagctcctcagacggctattccagaaattgtttcaaagatgggactcagatcttttaattagccaaccctgcctactgacttcttcaatttcttgttatgtgaggttaaaaaaaattcctgactgggcacagtggctctcacctgtaatcccagcactttgggaggccgaggcgggtggattatgcggtcaagaaatcgagaccatcctggccaacatggtgaaaccctgtctctgctaaaaatataaatattagccaggcatggtggcatgcgcctgtagtcccagctactcgagaggcggagtgaggagaatcgcttgaacccgggaggcggaggttgcagtgagccaagattgtgccatgcactccagcctggcaacagagggacactccatctcaaaaaacaaacagacaaacaaaacaaaacaaaacaaaacaaaacaaaaaattagctgagcatggtggtggacgcctgtaatcctagctacttgggaggctgaggcaggagaatcgcttgaacccaggaggtggaggttgcagtaagcagaaatcacaccactgcactccagcctgagtgacagagcgagactctgtttcaacaaaataagtaagtaaataaacattaaaatttttttttaaaatccttattgtacatttctgttgctcatggccaatagcgtcctgattgatcctaacttaatgaggactgaaccaaggccagcagagtttttttccatctagaaaggtgacagcaggtaaggcctagcctaaaagatattcattcacaacacctgtgacactttagtgctccatttttctgtttattggcatatctcttctactagactgtggtctctttaagtcaagatcacatgtctattttgtcttagaatttccactctccagcactggggctgttacttagtatacgtataaaatattggcaaactaatgaataactattgtcagggtagcttaattactttagagctatttgccttttggtctgtccccacaaatgtccttgattcattttggtgcttcggaccgggaactgacctacccaaccggtcctatttatctctgctaccgagaagtctgataatgtagggcttagggtttgaattttgtctctgttactttgcctaaaaaggttgggcacatgctttaacttctctgtacttcagtttttcatctgctcaatagcataacaatactagtcaacattaaatgttataataatagtaacaaacattattgaatgtatactgtgagtcaaacactgttctaaactccttacatgtattattagctgctgtcagcctcacagttaccctacaggataagtactaccattaactatcattatcctcatctttctttttttattttatttttgagacagagtcccactctgtcacccaggcgggagtgcagtggagcaatctcggctcattgcaacctccacctcccaggttcaagcaattgtcctgcctcagcctcccgagtacctgggattacaggcatgcaccatcacgcccagctaatttttttatttttagtagagacagggtttcaccatgttggccaggctggtctccaactcctgacctcaagtcctccatcggctcagcctcccaaagtgctgggattacaggtgtgagcacacggcgcccggccaatccccattttgcacaaaacaaaactgagggatagacaggttaaataatttccccaaggatacacagatagtaagtaataaagccgggatttgcacctaggtgttccgttctagagttcttacctaccatctataatatgtgtatatatggccctctgagttcaatatatgcatgcaaaatcgtttgccatagatacctttttaaaacaaaaatctgatcatttcacccacctaccattgccaccccagtttaaaatgtatcagtggttctaatccactcttaggatcaaagcaaaatcccctattatgactgatgaacctcacccatccgggctctctcagatcacccctccctgttgctgtctctgctccagacactctagcgtccttctgctccctcacactaccaggcttctctatcttgccataggacctttccatatactgttcactctgtctagaatgttctccccgtcatccttcctcctctccactttttttttttttttttgagacggagtctcgctctgtcgcccaggctggagtacagtggcgcgatctcggctcactgcaagctccgcctcccgggttcacgccattctcctgcctcagcctcccgagtagctgggactacaggcgcccgccaccatgcccgactaatttttttttatttttagtagagatgggatttcaccgtgttagccaggatggtctcgatctcctgacctcgtgatcttcccgcctcggcctcccaaagtgctgggattacaggcgtgagccactgtgcccggccccactcctctccactcttaactcctgcttattcgtcacttccttggggcagctctccctatctccccaaaccagatcaagtcctttcattagagggattcagggcagcagttacctttccttgccccacattcacgatccttccattagagggattcggggcagcagttacctttccttgccccaagttcataatttgtttgtgtgcttgtttggtagcatttggactgtaagctccaggagcattgcttgtttttgataatcattatatctctaatgcctagttagagccttgtacctggtaaggattcacttaatattttttggaatatgaatgaaagattattcattctgacctggactgtagcaccaggccaagggcaggaatcccaaagctgtgttgaaacttgcccaatgcagctggttacttcagccaagtttatcttgatagcctcatccatttattcatcaaagatttattcagtctctaacgtgtttactattgttctagcaggtggggattcagtggtgagcaaaacaaagtctttgctttcatgaaatatattctggttgtgggggactgagtgaatatataagaaacaggccggacaccatggctcacacctgtaatcccagcattttgggaggccaaggtgggtggatcacttgaggtcaggagcttgagactagcctggcaaacatggtgaaaccctgtccaactctactaaaaatacaaaaattagccaggtgtggtggtgtgttcctgtagtcccagctactcaggaggctaaggcaggagaatcacttgaacccaggaggtggagattgcagtgagccgagatcgtgccactccactccagcctgggcgacagagcaaggctctgtctcaaaaaaaaaaaaaaggaagaaaaagaaacagataagtaggttgaataatgtcaagagggagaaaactaaaatagattgagtagaatggggctggggggaggttactttggctacagtggccagggaggcttcttgatgaggtggcatttgaacagagaccttcatacagtgacagagcagacctctgcaaagacctggggaagaacattctaagcacgggaagggcacatacttgcggaagggcaggaaggccctgggctttagcctgagggcagggtgcagggcatcacaccccaacctcagagggcaagcaagttgacagctgcacacctttgtcgctgtgtgcttaaactggtttggagccacctctttgaggtcctgccagaagcctgcattcagaaacaatggagccagaaatgagtccgtttaagagccacttgtgcccattcgcccacacctcaggcgggtcaagcaggccgctgtcacattcactcaggatgtctctctctggaggtgcttctggctgcagaattgttttcaaaacagaagaacgttctgaattccgccttcccccactccgctctgtcaatctattgattatgtgtggaatgaactggagaactcaactaggagatgaagaaaaaccctcagaaacctcaaggccaagaggacgtggtggaggccaacttgggggttgcaggacatcacccacctacccacgagatgatctattaatagctcagtggttctcacacctgggcaggcattggcattacctgaagctgagatgaaacccaaatggctgagtcccgcacccacagtgtctgattcagcgagtctggggcggggcctgactgaatttcctgcaatacaggtgatgcattttttttttatttttcttttttaatttttatttatttattttttttgggagacagagtcttgctctgtcacccaggctggagtggcagtggtgtgatctcagctcactgtaacctcctcctccagggttcaagtgattctcttgcctcagcctcctgagtagctgggattacaggcatgagccaccacacctagctaatttttgtatttttagtagagacagggtttcatcttgttggccagacaggtcttgaaacatggcgaaaccccctctctactaaaaatataacatggtgaaaccctgtctctactaaaaatacaaaaattagcctggcgtgctggcgcacgcctgtaatttcagctacttgggaggttgaggtgggaaaatctcttgaacccaggaggcagaggatgcagtgagccaaggtggtgccactgtactccagcctgggtgacagagcaagactgtctcaaaaaaaagaaaaaaaaagttccagggcattgagcaagttaggtatcccctgtattcctcagtttcctcatttatatgtcagagaggtcttccttgacctcagtttacattgctccctttcctgatttataacatataatacaattattgtaatataatagaatatgaggtaagagatgatgacagctcccacttcatgaatttgccaggaagatttagtgagttcccttgtcctcagaagagtgcctggtacatagtagtgttgagttaatctttgctcaggtttttctgaagtcattctgacgaacgctcaggtgtgttgaaccctccttgtttgtacccgggtcagagtggacagcccttatcagaatcacctggctacttgtcaaaaatgaggatttctggccaggtgcggtggctcacgcctgtaatcccagcactttgggaggccaaggtgggtggatcacgaggtcaggagatcgagaccatcctggccaatatggtgaaaccccgtctctactaaaatacaaaaaattagctgggcgtggtggtgtgcgcctgtagtcccagctactcaggaggctgaggcaggggaattgcttgaacccgggaggcggagtttgcagtgagcccagattgcgccactgcactccagcctggcgacaaggtaagactccgtcccccccgccccagccaaaatgcggatttctgctccccagcccagatctgcaggatcctaagctgagggagcagatgaggctctggattctgcatttttttttaaaccattgcctctgggtgatttttgtgcagagtagtctggagagcagagtggagttaaatgagtctgggtttgaatcaccttgcagttcgggtttgtattactcagtgccagtggggccctgagcaaagtactttgctgggagccagtggagcctcacatactaatggaatgaagggtgcagatgccctggtgcacagagccctcagccctctgccccacccctggcatgccaggagtgctccaccatgtggctgtgggctcctggtggctctgtctcctccagagggccaagtccgcactggacacttcctccgcactaccagaatcggcctcagagtcacccagacgactctggtgggcttaaccctcctgggttcccatttgtcaaatatggccctgttctctctcttccttccttccctgattattaatacctgtggagtgaggagccctatgtggggaacagagctgggttaatggaggaaacagaatcacagagaaattttacacttgcagcttcctgttgtaagtaccttcatgtgaaaaagcatcctttctttgtgtttgaacagtaattattcttttgaagttagttgtagcatgtaagctgtcaatgctaaatgttggatataggagaagtgacatgaatgaatgaatgaatgatgaataaatgaatgaatctatggatgatgaactgattaataaacaggcagaagtcctttgcctgagcaaagaaagcagtcccaacaagaagtgggcagcagagacactctgcaccaaaatcgcatctggacccctggaggggaaaactctcttcctcctgtcctctcacccgttgcccatataattgtccactagacttaaaggcttttaaagggtgagaccctgaatttggcaaactctcttatttctttgcttttcggaggtatatttttctctagtttcttagttgatgctctatttgaaaaattccaacctggtcttaggataccgtacgaaaaggaacctcctccacatttcagggaggtaacgatattcacttcacagtaacttacttttggatggtgctttatagattgcaaaatatcagctagccccccacgaacaagtgtaagtctctctgctcctctatgcttggcactaacgcccaacccaaggcaggaactccagcaacgatgttgaatagaccatgtctgatttgagcctttaacaactaacattcgacttttatcattggaaactgaggatcagagggatggcgtggccatccatggttgcccagcctagatcagagcttggatgtgggagtcacatctctggtgatctaccatggagaagggcatggaggagggcctggcactggtaatacaaaggatggggattcacagcggaatgagatggtttcagtcagggggacttgatttaaatccagactctgcatcctgactaagtcctatgacctctcagcctctcattctccatccttgaaatgggaagggcacacacagctatttagcagggccattggattaaatgggagcacatgtgtaaggcacttgacccacaggtagagaatagtaaatgttggtgccctccttgcacccccaaacaccgagaatgacctccatgcctccccctcttccatccccaacctcatgtgggttttgatggtacgacgaacacgttctccacaccgtattaaaaagtgacatgagtcaaaggcacaacaacagcttctttgttccaagatttttcaagaaagagacatcttaagctctcagttgcactctccctggcgtatcctggctagtttcctgaagaatgaatgacaaagctgattgctgcttcacagagtggaggtggaaaaagaaaatgggatgcataatttgttaaggagcaagtttttcaaatgtcagtgacttagcatcagggagctgcaggctagggggcctattgggattctgcttctgggaacttctgtgccatcattttgctcgattaaattctgtatttcagcccactccgcctctattcatctgcttcagtgcaacactcctaatttgagtagctctaattggctcagatggacggctgcaaggtagacgcccttcaaggatggcacacttcgggggctgtttatagcgatgctgaactttaatcaaagatagcatgggaagaacacagctttggagacaaataggcatgggtcattttctgtatgaccttaggtaatactaggccattctaagcctgtttccctgcctataaaatgggggttatgttgtgacttcctaaagccattgcagggataaatgaggtcagacatggtattagtgcctggcacaggaggcagacattttttacaacaagctgctgcattttcataaaaatattttattatgccaaagaaaatgtatgaattctgaaatgccaggtagcatgatggctctgtgagcaatgtggcactagtgacatctgttgtcaaatttcagagattcacaacctcctccaggtcattacaaatccagcccttattcctgcggactacagtctagattgagaaaataaaatatgaacacgatgtctggaaaatgactttgtatttaggcacttaggttagaatgcaggttcaattctctggctccaaatgttagtgtttctatcagttataacaaataaatatgcagaggcaaagctgatcgaccgtttcattccttttaagaaacggcgagatgaacagcttccctaagtcagtgtgtcacagcatttaatttcatgatgttgtctagaaactctgtgtactgttttccaggcccaaacatatcactcatttacaagaagaaaatcaaaagacaagctaccaattcccagtaatgagggttatttgttgatcataaacgtagactccattcccagtggaggagaggcaggggctcttgtaggattagaaatgataaggaaaaaacgccaacaatcacgcacagagcatggagtcagaagcccaggaagtggagacctctgggcccctggttacgtgaccttgggcaggtcacctgccctgactagaaccatctcctcatcctgaaataggcagcagtccttcccattcatcctgttcacactgaggcttttcagagccagctctttattccttggatcttttttcaatctttacaaaatccagtgaggttcgtgacttgcccaaggtcagagatgtaaaaagaagcaaagccaggattaaaactgtagtctgtatgctgtccctatacactataaaataatacgagagctattaaaaatatgatgacagtaaggaccaccaagacattgaagtaaaaagaaaaatactcattcattcattaataaatatttgctgtctagtatgagcctggcaccattcctggcacctggcatcaagatgatggtggtagctgagcataatggggagacatacaataaataagcaagtaaatgacataatttcagataaggcaagtgctgtgaagacagtagaacatgggttttcttttcttttcttttcttttttgagacaggatctgactctgttacccaggctggagtgcagtggtccaatctgagctcactgcaaactccgcctcctgggttcaagagattctcctacctcagcctcctgagtagctgggactacaggcacgcaccaccatgcccagctaatttttgtagagacagggttttgctatgttggccacgctggtctcaaattcctggcctcaagtgatccgcctgcctcggcctcccaaaacgttgggattacaggcgtgagccaccgtgcccggctggaacatgggttttcaataatgaaggtgaggggtagcaaatttaaatcgaggttgggaaagtcctctctgaggaagtgacttctgagcagagccatatagggctatcctgagaggtcaaagcacagacctcctctttgcaagggcaaaactcctcagaaggaacgaagctcgccatggtgaggatcaagaggaggctggtgtggctggaactcagtgagaaagtgctagaggatgaaggcagagacaggcaggctgagttacgaggccttgtagctgaggagtctagattttctgttaagtgaagacaggaagtgagataactgagttagttatttaattaatgtaaaaaagttttgtggggggtgggggacagagtctggctctgtcgcccaggctagagtgcagttgtacaatctcggctcactgcaacctccgcctcccaggttcaagcaattcttctgcctcagcctccctagtagctgggattacaggtgcgcgccactacacccggctaatttctgtatttttagtagaaatggggtttcaccctgttggcctggctggtcttgaactcctgacctcaagtaatgctcctgccttggcctcccaaagtgctgggattacaaacatgggccaccacacccggccaaattcaagtaaaaattttaatttgacttattgttaaactgatgatacgactatttagagtcgtaggattcaaaactcaaaagcaccaaaggcagagagtctccctcccaccctatccccttactgtccagatcttctccctggaagccatttaggtacaaggttcttgtgttttcttacagagatgttatacacatacaaaatcaaacgtgcacacacatgcatcctccctttttcttttacaaatggtagcataatattcacactctgtttttttgaattcttgtcttggagagcatttgtggcggtattggtagagtgtttgcatggtcatttgtttgtcttgactgcatggtattgcattgcataaggtactgttatttatttacccagttccctattgggaaccatttaggttatttcacttgaaggttttaaggtaacattctgatttatattttagaaaaatctctctggctgctgccaggaggctgctgtgtaggagactgagcatggaagccccagcccagccctgcccagttaggaagcaactattgtattcagcaaaccctgctggctctaacgagaagtatcatcccgagtgcatcaccatcacttctcacctccatggcctctcattatgcactctctgcctctactcttgccttcctggagccgttctccagccgttagccaaatgggtcttttcaaaggtgagtcagctcatgccacttccctgttgaaaacgtcaatgttttcccatcacagctcaggtaatattaaaattatttcctgtggcttccgactaccgcccgacctcactggcgcctctctcccaggttccctgtgctccagcccctcatcacctgggatggggttgtctgcaccgctgtccttgtgcctgatgtccccacacgctcgctcctcctccaccttccggtagtcccagcttgaaagttctgacctcatccccttccccaacacacccctactccctgtcacatcactcgaatctgctgcctacaattggtgggagtgaaaccacttagtttgccaactttgaaggaatcctgtgaaatgctcaggtaactggcaccaatttcccatttgttcccttgacatttcagtgctgcttatggattagtgctttgggcagctgcacagataacccaccttttgatctgggtccgcttggcacaagatacaataaatgtcatgataaatgtcagccaggattacaatgcttccttcacaaaccttagcacagacggtttcaataaagattgcttgattaacttttttcttctaattcaatgccattttaatcatgtgcctactttttgcttaaaaggcctgtgaatttcattctgacaaataaaattattttccaaaaatgtacacaattgctttggcgatgttcaattttcatttctttgcttggtaacagtgcttagcatttagctgagacttctttatggaaactctgcctccaggagaagtagctaaaagtctgaaaagtaatatttgatgtatcataaggggatagttattaaattcttttattaaatttaagtttttataaaacagaacatcttcaatgtggaagagctacatagaatcacactgaatgactttaaagacatttatttcaaagactgccatgtatcacactggttaacagtcactctggatacaattttctttaaagagaccacttcattccactacagccacttcaactgcttcctcaatggcttagagaggtccaggggttttagagagtcagtgggaagtcatcctagagatcatcaaagtctatcttcctcctttctcagaaaacaaatacctgatagtgttggtgcttcctttctcggaacaattgtgttccctgaatcatacacagtggatgttttatacacaaaattgtattctgattgcatatacatactatgctaatgaatcaccctccaatccatttgtagagtgctctatctgtagagttatagaaatatcagtgttcgctcaagatggtccattgggatgagaaaatattaggacttatattcatggttatgtttatttgaaactaggagagatactaagttttactagtgtttgctacatggcctgaccccaaaggccacactgggtcatgtgtcatgggtggtaagcatgggggcgtcagagtggtagcccgtggctctttcactgacttcttggccttcggtgtattaccatgtgttacagtttccctgctagaggaggttatcaactcatcaacagggctcatttggcaaaaccgagacccctaaatgatatgatttttacaatactttaaaaattggctgtatctgtttccagatttttttcccctaagcatctactaacaaatagttatatgtattagaaaacaaaaagagagccgggcacagtggctcacacctataatcccagcactttgggaggccgaggtgcacagatcacttgaggccaggagttcaagaccagcctggccaacatggcaaaatcccatctgtataaaaaatacataaattagctgggcgtggtagcatgcgcctgtagtcccagctacttgggaggctgaggtaagaggatcgcttgagcccaggtgattgaggctgcagtgagccatgatcacaccactgcactcgagcctgggagtcagaatgagaccttgtctaaaaaaacaaaaacaaactcaaaaaacaaaaaaagcttcataatctacatacacctcttttcttcactcagccatatggtttgggcatcttttcatgtcactatatttagctctacctcatttttccctaccttattcttttaaatatttgcatagagttccgcagtcatccctctcattacaaggttagtttgttcctaagaaaattcatagggtgaattttcataaacggaaaagataattactatttcaaccgatggtacacagttactgcacaatttcagaaacaaaatacacacatgattctcaaagtcataaaaatttttttaaaaagcagtataagagagacaaaggaaacaatgcaagtgatgcctgagtctgttacttacaacccgcaccaactatgtcaccatagagaagaccatgtggaggctgctccagaggctcaatagcagtctttgctaatgcagtgaaatcctcacaagccaaagaaaagaaatttaatggaaattaaactccttttaaagtcaaagtcttgaacttgcatgggcatattttagggtaagactctttcccatagtatggatgcattataatttatttcccaactgttcattatatggacatctgggttcatattaatctgccaggactcccataacaaaataccacagactgagtggcttaaacaacagaaatgtattttctgacagtttcagaagctggaaatccaaaatcaaggtgttggcagcttggtttctcctgaggcctctctccttggcttgcagatggcaatcttttcagtgtatccccacatggtctttcctctgtgtgtgcaccctgggtgtctctcttcttagaaggatactagtcatattggatgaggtcaatatgaggtcattacccatatgacctcattcaaccttaattacctctttaaagaccttatctccaaatatagtggcattcaaaatcattaggagttaagatgaattttggggtgcacaattcagtccataactcagttgtttctcatatttttcaccgatattcctcacctcacacactcctcaatccattctaatctcatttccaccctcagtgctccaatggatatttccctcctctgagtgctacctggtcaattgtgattgttgctcccgtaaacaactacagtgttctccttcttattggttccatgatgtttatcatcccccctgccgccgcccaatccattctcccatagacatagtaaaatgcatttgtaatctaatcaccccaccccttatcttgatactcttccctgacttcttgcttttgaattaagacgcaaacaacttaggatggtggacaagcccttgcaggatcagatatcggtccacctcattcatactccaacagcctcctccaacccacttcattccagccacactggcttgctttcatcccatgagaaaggtcaagtcttttcccacttcagggcatgaattgtgtcctctgccaagaacaacctcctctttgtctgtctcatccttcacacagattaaaagtgagtttctcagtgaagctctccttgacccccacttgtcaggttaccattgtcccaggctcccacagaattctggattttctctgcagtggttattacacattgcagtcactggagcgattgtttcatatgcatctcccccaccagaccaagagcttctggagagcaggggccacatggaagatgctcattcctgcatccccaatgctcagcccaattcctggcacaaagtaagtactcgataaatatttaatgaataaataaactcgttgcatttggctgtttcctccatttggaaggcccttttcattctcatccatctggcacgttgaggccagccagctcctatatcgctctgattagactgtgaattactttcatggcaggacctgtgttcccagtgcctggtaaagggcatggcgcacacagcaagcctgccggttgaagcagatcatttttactttgctgcgtatccaggtcctacatcactgccctactgaaggttcttgagtcaagaagcagatgaaaaaattatcaaccttctgtctgattcataatgactatcaccggtagtcatttattttgtatgatttgtctataaatcatacaaaataaaactgacaatggttaagatggcacctgtgaaatttgttatgaactcagaagactcacatcttaaaggtaacactggaaattacaagaagcaaaggaaatcagatctggttgaaataatcaatgcaaactaaaacagactgcccacgtaaaatttgctccttactaaacatttgtagaggactgccattgacagatttttggacccacaaaattttgccaaaggaaatggaactatggcggctgggcatggtggctcatgcctgtaatcccagcactttgggaggccaaggcaggcagatcccttgagcccaggagttcgagaccagcctgggcaacatagtgaaagcctgtctccaaaaatgaaaatcaaccaggcgtggtggtgcatgccagtagtcccagctagttgggaggctgaggtgggaagattgcttgagcctgaaggttgacgctgcagtgagccctgatggcgccactgcactccagcttgggcaagagggtgagaccgtgtctcagaaagaaaagaaaatagaacttgctagtgtcaatgccttttagccaaagaccaccaggacacacctatagttgaacaagttgggttgcactgagggagagtacataccatgacagaactatgggggggtatcttcgaaaagaggtgttataaagaacctattactggatttgagcttttatgggtaatttaaggagggcctatggaagttggattcgccctagattggaagtggtcaggaagcaggagccaattccatgattgggtatctcaataaatctaatctatagagaaggcaaactagaagaaagataaaactgtaattagttagcagggggccgggcacggtggctcacgcctgtaatcccagcactttgggaggctgaggcaggcagatcacgaggtcaggaaatcgagaccatcctggctaacacagtgaaaccccatctctactaaaaatacaaaaaattagctgggcgtggtggcgggctcctgtagtcccagctacttgggagtctgaggcaggagaatggcatgaacctgggaggcggagcttgcagtgagccgagatcctgccactgcactccagcctgggcgacagagcgagactctgactcaaaaaaaaaaaaaaaaaaaaagagagagaaaaaaaaaagaagtagcagtcactcattttctccaagacgggtgtttggtattttgtgagtggcacagtgactgtgtttttgtctgtgcttagacaaaatttcaaagtagatttgctatgtctcactttatcaggctctctgtaaccatatctgaggttgttattttgtgacgctacgtacaataggaggataacatggtggacctgtgatgccaggctagcttctgaatgtcggggttcccttttttttttctttttcaataaaataagcatgaaatacaaaatatcacaatgatggaaaccaaagtaaaattcgacatacaaattttaaagaagtaaaatctttatcatgaaatttatatgtaaaagaatcactcagtaaagacaatttccataaaataaaaatggatatggatactatttaactatgttgtattaaaaaaaactgatcaaagaattggtttaatggaaaatgctctggaaaattcttttgcaacagttcatcgctgttgatataatcctaattaaaattatcggactccagttttggtggagatgtaaatttgctagtgtctttgaagagcaatttagtcatattcatgaaaattaaaattgcatgtggcctttgacatagaaattttacttctggaaatttacagagaaagttgcacgtgtgcacgtacatacaaggatattaccactccactctagtattttttgtagtaacgaagattgaacaaacattaatgtcctccagtaagaagctgattaaaattcagtatgagacatccattgtacccaaagctaggtggccttaagaaggtcagtgtcgctcagcgacagggctcggccccccctcgtgcaaacccaccccgaggtgtgaggccaggagtgtgcggtcacgaggcgcccgggaagtgtgtccaatgcccgaagcagcccccacccgggcggtcctgagtccgggtcgcgctctggtgtatctcttttgacgtctgctacccacagcctggggcaggagagtggcgacggcgaggagcaactgcacgcgacttgggaccttgccctgccccgcggcccgcgtcaccatggcaactgcaggcagccagcaccgacggcgggaaaacgaggaccggagccgcgttacagccttggccttcgagcagcccagggagagtctctgcgtcctccagcccccgcttcccttcatgtcggaggtcctaagcccgcagcgaagtccgcaaagagctttccccgacgcctacgagaccggaagtgcctgggcccaggtggaggaaggacccgcgtggccgcctccgcgctctccctggggtccgtgccccttccggcgtttctcccgcgtccttcaccatggcaactcgggcgtcgggagcgtgggctgcgagccgagtgggtgggggagccgccgggctctatccgccagcccacgagaagtgacgcaggtgacgggaggccgcagggacctgagggcggagaggggaattcagaaagtgccgggcggcggcttccgcttcctctgcggggtctctgggtggtcgtggctgggagctgccggggcccggtggccgtgcgcctctgctccgggcaagctctccctgcaaggcccgggcggcggcagggggcagtagcggcccgcgatgctcagaggctcgctggcacggagctcccgggctggggcgtccagatctggagaagccgggggccttggtcacactcagagctgacgtccagtgcggcccttgctgaggactcgagcgaacagatctctacccagcccccgccccacgcgcacccagcctgggtcagctcgccctgcccgcagccacgcagctggtggctaagcgcgggctccgggttcaggctgccttgagctctgttggttccctctgaaagtgctgataatgatagcaggtatcttgggattgctttgagtattaaacgagttaatcgtacttagtacaatttctggacttagtttctagcacgtgggaagtgctcatgggcttgcctggggcaagttagttgacctctcaaccttgcctcattaaaaagtggggataataatagtacccacttaataccgttataataattacagtagttaatatttgtaaagccccttgccttcaagaacttaggacattaaaaaaaagattgtgaagtccctagaatggtgccaggcacatagtaagctgcctctattattaccatggtcatattgttgttatcactatgttaaataaaatttataagaggctattggtttggactgagctcctgcactatgcccaacagatcaacccaacatggagtcacttatgctgaagttccgtgccaccaagctgaaactaagttgcttatttgactttcctagaaattaggagagagagacagttaatatagccaaatgcccaagtaaaccagctttagctggcatgatgaggaagtcctctctgctttaacctttacaaggaaaataactttgaaacaaccaattcgctttttgttctgtgtttctgctttcttcagcccttttctgtctataaagccagcctcctcagctcagctcatcagagcactcattctgttttatagaacgaggcatcggctgattctagaatgcaaatataagccaattaagattttaaactaaatttcttgtaatttttgtcttttgacaactattatcgtctgtttgccttgtgaggttggaaaggattgcacttgtcctgctacaaggactcttagtctctggctggattacagaaacatttgcctgcatttctccttttatttcccaaagtttttcagcgtcttacatggttctgtagaagaggcaggatcgtgtccttaaaagaccactgggctgtgagtcaggtggattttggtcttgataatgctacttgggcaggtcactgtttcctcatccatctgtaagcctctttcaacaaagggtagctggtattatctattatgcatgtttagcctttccggtaaggtaatatatttagtaaaactaaattagcatctgtcagcaactctccagggtagtaggagaaggtggcaggtgctttgaggaagttacagatgagaagctatgggattctgagaagggagagtaagcttcttaatttatactttaatttctaataagtagaaatgtcaagatgtacgggggtcaaatgagaatgattctacccctccaccccactaaaaagtctgggaaagtgaattttcccctctgaggccttcttatttctcagttggaaataaaatgtatgttggcagctacattcattattgcttgcagtgtaatccggcccctgttatggattcccagacttgggctcctggactgacttcttccattggcaagaacatcatattcaccatattcttctctttctctctctctctctttttttttttttttttttttgagacagtctcgctctgtcacccaggctggagtgcagtggcatgatcttggcttactgcaacctgcaacctctgcctccccggctcaagcaactcttgtgcctcagcttcccaagtagttacaggcatgcaccaccatgaccggctaaatttttgtattttttagtagagatggggtttcaccatgttggccagtctggtcttgaactcctaatctcaaatctgcccgccttggctgcttcccaaagtgccgggattgcaggtgtgagccactgtgcctggccctttgttttttgtttgtttgttttggagacagggtctcaccctgttgtccaggctggagtgcagtggcacagtcacagctcactgtagcctcgtcctctagagctcaagtgatcctttcacctcaacctcgctagtagctgggaccacaggcacacacaaccatgcccagctaattatattttcattttttgtaggaacgggtagggtgtctctatgtagcccaggctggccttgaactcctgggctcaagggattttccctccttggcttcccaaagtgctggaattacagacataaaccgccgcacctggccttctttctgttttcagaaacctcccttcactcaccagagtgtaaggtccctatttatcccacttaggttaatgcactaggttagagtaagcagtgtttcctagcagttatgggcattggcttttatagtcaggggatttgagccctgctgtgattttgaatcaatgtctgagcctcagtttcttcatcttcaaaacaaggacagtaatactccgggctgttgtgatgatagcgtgagatcttgcacttaaagaatccagcatggccgggcatggtggctcacacctgtaatcctagcactttgggaggccgaggcaggcagatcatgaggtcaggagttcaagaccagcctgaccaacatgatgaaaccccgtctctactaaaaatacaaaaattacccgggcgtggtggtgcagatttgtaatctcagctactcaggaggctgaggcaggagaatcacttgaacccaggaggcggaggttgcagtgagctgagatcgtgccattgcactccagcctgcatgacagagagagactctgactcaaaaaataaaaaacaaacaaataaaaaaagaatccagcggtacctgctaggacaagtgctcaaaaaaaaaaatgttggctgctctttttaaaaatatacataaataaatatggggtcttactgtgttgcccaggctggtctcaaactcctggcctcaagccatcctcctgccccggccttccaaagtgctgggattacaggcatgtgccaccacacccagctggctgctcttttttagcactgtcatcatggttattacattgttagttcacaaaaggcagggtgatcttttgtagtctttttcttctctttattgcttggcagatctctttattgccagcaaatgtttgttgaatgaatgagtgaatccacccaggaagctctagtagcagtgaatttcacattgccctgactaatagcagctctgcgccagaaaccatattcagtcccattaccttgttgaatcctcaagtttgatgactttgtctagccttccaatttggctcctgaagcattggtgtcattgattcacagtccagaagctgggagtaatgtctgctgcagatttctgtattgtttccgtaatgaagctgacagcagcataatatctgtagcctgtgctaagataggagttgggtgtcatgctgacgtcaggcagtgtgttctcatctccccaaggatgagctggcttccttgatgcagtttcctcatctcattagtgcattgcttgacattacacttctgaaacagcagggctcaatcagagtttagcactgcaactctatcagggtgataatgtcacagggcatcagattccttcttttgtccctctgtggccacttccagagaagtgtagcagctgtaggggaaggacagaccaaggaaggtctttttgcttcttctgatccactcactgtatttgagttttgggttagagaagcctttagaaacctctaatttagtactttttaaatactgttctgtgggggttttagaattcgtaggactccctcatcctgccaggagctgtttctggggagaataactacctaaacaggtagaacttggggcatcctacctctgattcaaccaaagtgagccctgtgacatctctggaatactgaagaacaaatttctttttattcctcagtagagactctgaaagccagtcagcaacattgttggactttgagcaagctatttatgcatttgcagtgtttattcattcattcagcacattctccgacactttactagggggctggggatagagcaagaaacaaaataaagatcctgccatcaaagagcttacattctagtaggaggagacagacagtaaaatatgtgccatgcagggcctctccaaggatgtagaatgaacagacggctgaaggaagtgagggctgataaatggtggaagaatgttctaagcagaagaaatagctgtgcagagtctctgaggtaggatgccagagcagctggagaggagggaatgatagagccagtggaggtagacaagaggctgaggtctagattaccaggacctcggaaccatggaaagcactttagattttactcagaaggagatgggaggacattggagaggtgaaagcagaggaatgacaagacttgattaataggaacattccggctactgggtagagaatagaacttagggagtgagagtggaagcaaagaccaaggaggcttttagaagggtccacgtgcgaggtgacaatagcttggactggcatagtaaagaaaggtgagaagcacttggacttgggatgcattccgaaggcagaccttacacattctgctaatgagttctatgttgggtgggagagaaagaggaatcgaccgtgacctcaaggcttgggcctgtgcacctggatgaagggcgctgtttactgagacatttgtcacagtcacagtttgccaattcaactgcttttcacgatggaggaggaactgctctagggtgatgtcagaagctctgagaccaggagggtgttttagctgaggctttctcataacagtcacttgcccacagtcacacaagttggatctagaactagagcaaatgatccctggtgctaaggctgcatagtgcctattagcatccacaaaaatctcatttctgtttggctgcgcttcagattcaggcagctggtgtattttgatgtcttggtggttccatgctgtgagaagagtttgtgtcatgaaaattagcagccttctcttttctcccaggagcaccattgaaggagaattagacaaactggagtctactgagatgaggctgttgggaatggccctggtaccacatcctgagcagggatggccgatggaatggggagaagactcaggtggggcttgagtgtgtcctctgatgactgaagagccttgggagcaagcatccttcctgctactgtgtgtttgctggttccaatgatacataatttgtgcttttcgtaattaaagtattatcctgtagatcttgatggtgttgactacttccccttggaggcgtgtgacctggagatgaggttagcgtatcccaccaccacgtttccccagaccaaaaactgaagcagcctagggggtttcagaagttttaaaactgggcctcttgggtcttgatctataaggagatgagatagttcctgtgtgggcacaaacgaaggtgggggccttgcgccagtggaggagtccggggggaagagcctagaggaggcagctaggaagcttgtggcagctacagaggctacatatgtgttggcttagggccagaggcctgtcctatggagacttgtctgttctgtcatttaggaatatgtgcagctgcaagaaacagaataccacttaaggtgccttcagaaaagcagggctttatttttctgtcatgacaagagatgtgaattggtcttggttcagttgctaaaccttgccagcaagaattcaggcctcacatctcccctcccttggcaggctggcttttgttctcctggccacgaattgcctgcctcggctctgggcattaagccttcattcgggacgggaagaaatgggagagggaggaaggggcaataccagctgggtctttttttttttttttttttaacattctcgttctcttttaagactttatttatttaagtggctttagatttttttttcttagattcacaacaaaattgagtggaagatacagagatttctcatacacctcctacccacccctccacacccaccgtctctccattatcaacatccctgaatcaagtggtgtatctgttacaactgatggatctgtattgacacatcacagtcaccccaagttcacagtttacattagggctcactcttggtgttgtacattctgtgggtttggatactcctgtgatgacatgcattcgctgttatagtctcatagtcttatacagagtagtttcactgccctaaaaatcctcttcaatacttcacctattcatcactcccttcccccaacccctggcaaccactgatcttttcactgtctccatagttttgccttttccagaatgtcgtataatgggaatcatatagtaggcagccttttctgattgtttttttcttcatttagtaatatgcatattgtaatatgcaatacatatcaagccatgtatttctatggcttagtaactcatttcttgtttgtttgtttttattttttgagatgaagtctcactctcgttgcccaggctggagtgcaatggcacaatcttggctcactgcaacctctgcctcccgagttcaagcaattctcctgcctcagcctccaagtagctgggactacaggcacacactgccacatccagctaatttttttgtattttagtagagacgggatttcactatgttgcccaggctggttgtgaactcctgagctcaagcaatccgcctgactcagactcccaaagtgctgggattacaggcgttagccaccgcacctggccaataacgcatttcttttgagcactaaataatattccattgtctagatgtaccatagtttattcaattatctactgaaggacatcttagttgcttccacgttttgacaattatgaataaagctgatgtaaacatctgtgtgcaggtttttttatggacataagttttcagttctttcgggtaaataccaagcagtgagattgtaagagtgtgtttagttttgttagaaactgccaaactgtgttccaaaataactgtaccactttgtattcccaccagcaatgaatgggagtgtctgttgctccacatcctcacctgtgtttggtgtcatcagtgttcctgattttactcattctaataggtgtattgtgtcagtcttttttaaatcaggaaagccaaaactttcccagaatcccatccaaatccccaccccagcagccttccacttggccagaactatgtcactacgaccatccctagctgaaagagagatgggaaaatgagtatttagttttgtaacctctctgggagagggagacaagcgagaaagggggaagagcccctagggcaacactgtccagtggaaatagagccacatacataattttcaatgtcctagtagccacattttttaaaaggtaaaaaaagaaacctaggtgaatcaatgtttaaatatttattttatctaacccaatatatccaaaatcatttcagcatgtaatcaatataaaaattatttaagagatattttacactcttttttaaaataacgttttcaggccgggtgcagtggctcatgcctgtaatttcagcactttgggaggctgaagggggcggatcacctgagaagtcaggagtttgagaccagcctgatcaacatggtgaaaccgtgtctctactaaaaatacaaaaattagccgagcatggtggcaggcatctgtaatcccagctacttgggaggctgaggcaggagagttgcttgaacccgggaggcagaggttgtagtgagctgaggttgtgccattgcactccaggctgggcaacagagcaagactccatctcaaataaataaataaagctttcaaaatatgatgcatattttgcacatacagcacatctcagtttggaccaggtacatttcgagtgctcagtagccacatgtgactaatggctgccatattagacagcacaggggtagacggcatgttgggtgagcaagcccattcttgccacgccccttttgctgctgctagtattctctgtaattatttccttttcattctcccaactgattttagaaaatgccatcctgtcttagcctgctgaagagaaagaagaaagggggttgtgggttgtatttgggctaaagtaataattagggagacaggagcatcctggggccaggcaaagtaagagcagtggaattgaaactttcagagccccaggggactggtgaaggatggatgggaggaaagggacagcaagaggtaggccaattgctgttgtgaggaagagtaaaattcttaagtcaaaatcaaaataaaggctgggtgtggtggctcatgcctgtaatcctagcactttgggaggcacaggtgggaggatcacttgagcccaggagtttgaatccagcctgggcaaaaaagtgagatccccatctctacaaaaaagtaaaaattagccgggcattgtagcacacacttgtagtctcagctactcaggaggctaaggctagaggattgcttgagcctaggaggttgaggctgcagtgagccatgatcaagccactgcactctagcctggacaacagagtgagaccttgtctcagaaaagaaaaaacaacaacaacaaaaagaaaactgtgttgttctctgattacagaagtgaaacttttataaaatatgaggaaaacaaaagcactgaataaatctctttctaatgttagtgatagtcactgttaatagcatattaattgtatattttattttattaattttgtttatacttgtatatgcatacatgtatatgtaacacctgtttttttttttttactttaaaatatattatgaacctttccccgtgtcattaagtcctttttttttttgggggggacagggtctcactctgtcactcaggctggagtgtagtgggacaattacagctcactgcagccttgacctcccaggctcaagtgattctcccacctcagcctcccaaatagctgggtctacaggcatgtgccaccatacacagataatttttgtatttcttgtagagatagggtttcaccatgttgcccaggctggtcttgaactcctgggctcaagaaatcctgccttggcctcccaaagtgctgggattacaggcatgaggcactgtgccctgcctttaagtattcttttaaaataggatttttaattaggtgattggatgggatttcatcctatgagtatactgtaatttaattcaaccagtcctcttttgtcggacattaaggtttaatcaagatttgtctgtgataggcaatgttgctataaaatctgtaatcaatcttagtgcacatttctgatttgctggttgagggggtataaatattttagggcaatttatgcatattttcatcttctttctttcttttttttttttttgagatggagtctcactctgttgcccagtcaacagaatgagtgtagtggcgtgatctccactcactgcaacctccgcctcccaggttcaagcaattctcctgtctaagcctcctgagtagctgagactacagttgtgtaccaccacacccagctaatttttgtatttttagtagagtcggggtttcaccatgttggccaagcttgtctcaaactcctgacttcaggtgatctgcccacctcggcctcccaaagtgctgggattacaggcatgagccaccatgcccggcccatattgtcatcttcttgaaactgtactaattggaactacctaacaacactgtaggaaacatttttctcattttataagaaaaaactttctaacaaccaaagaaagaatgggaggcagcaagctttctgtcatgaggcctgttggagtatgggctatagccatggtgtcgattctttttccctcactgacactgagcattagttacaatggcccataaaggggaaagttgccttctcttgcccttagttggacattacagagctagattgtttggtggaggcaataacttaagaaataaataactgcattgggatcagcattgggctaatgacctttaaggtttcctccaggaccttaaggacctacgtatgatacttatacctatgaagtttctgtcctgtttctaacatagcctgtactatgcttgtctgtgctctcagcaggtagggacatggtgagctcctcaagggattttcccaaagtacgaatctctttgaggtagacaagtttctcccagaggatgaaaagcatgtcgtaaaatgagcatcatgttgttcagctcttttctatcactgctgatcttccatctagtcattttattagttgctgtattagtctgttctcgtattgctataaagaactacctgagactgggtgatttatgaagaagagaggtttagttgactctcagttcccaggcttggcaggaagcatgactgggaggcctcaggaaactacaataagggcagaaggcgaaggggaagtaggcacaatcttcacgtggtggagcaggagagactgagagagcaaagggggaagtgccatcagatgtcatgagaactcactcactatcatgagaacagcaagggggaaatcaccccatgattcagtcacctcccaccagccccctcctcaattagacatgagatttggtgggggggacacaaatccaaaccacatcagttgcttagagggggatgttggagtccccaactgtaatgtgggtttatctatttctcctttcaactcttatcattttttgcttttgcttttgctgttgttcggtgcatgcacatttagaattgttatgtctttctggtaaattgattcttttatcattatgtaatgttcctctttgtctctagtaaatttctttgctttgaatctaccttatcagatataaatgtagctactcctgattttttaaaattaatatgatattcttttactttcatcctacctatgttattgaatttcaaatgagtctcttataagcagcatgtatttggatcttttttaaattcactctgccagtttctgtcttttgattgttgtatctagacaagttacacttaagataattactgatattagctaatattactgatattgctaattgctgataaattactgatattactaattacctcttaggtgtgcaattttattgttttctgttttttccctctagttcttattcctctgtttctctctcttgtctttctttgggtttcttgaacatcttttagaaattcatcttgatttatttacaagactttcaagtgtatctctttgtataattcttttaaaggttgctgtcagtattacactatacatatgtgacttaaccattttgagtgaagtgtggaaatcttactttgatttaggtctatttaccttccatgattttaaatataatttgcatgagtatcagatagggttttattttttgctagaataggtgaatatgacttgtaaaattcatgatgagaatagtctattgtatgtacacatatttctaattgtttccactgcactttcttccttcttgatgctccaagattcctttttttataatttcctttttatttaaagaactttctttagccaatctttaaggatttaactgctagtgtcaaattcttttagctttcctttgtctgagaatggttttatttcccctttattcatgaaggataattttgccagatatagaattcatgactgacagttcttttctttcagcacttgaacaatgttgtgccacttccagctggcctccatggtttcagatgagaaatctgctgtcattcatattgggttcccctataagtggtgcatagttcttccctggctgcttttagcatgttttgtttgtctccagtcgtcagaagttcaattatcatgtgttgtggtatggatttctttgggtttctctttggggtttgctcagcttttgaatctgtagatttgtgtctgccaaatttggaaagttttcatccattatttattcaaatactattttaggccctttattctcctctccttctggcacttcagtgatacaaatgttggcttttttgttatagtcttacaagccttggaagctccgttcattcttttttcagtccattttctgtattctcacattggttaaattcgttggtctgtcctaaagttcactgattctattctgtcatctcccctctaatattgagattatctgttgagatttctgtttctgttactatatttttagttctgtaattttcattggttcttttttataacttctatttattgctgagattttctattttttgttttaagagaattggtaattgatttttaaaacatttttatgacaactgctttaaagtcctctcagataattctgacatttaattcaccttggttgggatcagttgattggttgttctttctcatccaagttgtgatttttctggttcttggtataacagatgatttttaaaattgtatctcagacattttgtctgttaggatattcagggtcccatttaaatattttattttagtaggcactcactgtgtttacatttagcacacaggtcctggccactttcgtggactgtggtttacatgacagtttcattttcagaggctttacaatgttatttgggtctgtttggtgtatttggcactgctggggctctcacaggtctttgctggtgctgcttaagggggcagaaggactttccccggaccagggccactagatttctctccactgatgagtggagtctcaggtctgtggagacaaagaggcttcttaggccatgcccttttggcagaatcaatttttcttttttctttttctttttttttttttgagatggagtctcactctattgcccaggctggagtacagtggcacgaacttggctcactgcaacctccacctcccgggttcaagtgattctcctgcctcagcctcccaagtatctgggactacaggcgcccaccaccacgcctggctaatttttgtatttttagtagagacagggtttcaccatattggccaggctggtcttgaactcctgaccttgtgatctgcctgccttggcctcccaaagtgctgggattacaggcatgagccactgcacccggccggcagaatttcttttattggtgccacgggctacctcctatgtccctgggttgggggaatggagtttcaggcctatgaggatagagagccttcctggactgggctgggctgggctgcttgttatggctgagttcctcccaccagtgccaccccactaccctagtatctctttgtgaggtatggaagtctcaggcccagcagggaagaagagcacttcccttggctgccttttttcagtttttttgaagcagaactccctctctataccttgtgtgagtactgccaggctcacctggtgttgttggaagggctcttgttaaatctgagggaggaatgagcccactgagctgctttctgttgctaggttggggatcagtaatgctgggcccacgctgccttctgtttggtgggaggacaaaacacaagaaatcttcagttacttttataacactgccctggcctcctcccccttccttgcttctctggccccttgtacagtaattgcttgttgagtgaccctcatggttgacttgatgttgtgcctggcactttgtctgtacctgaagcactctaaaattgtaccattacaatgacttgggggagccaagccctacttgtcttttcagaacacatatcttatgcttgtgttgtgttgcattcagtcaaaagcctgtatttgatggctaggcaggtctcacttaaaagaataacaagaaagcagaaaagaaaaaaaaaaaagaattgaaagctcttcttcattgttccataggttcagaaaagcacaaaaactctgggcagctctctagtgggattttcttttcctccctagtgtgaatattcttaagagccaggaggcttaacaaactctgggttcttatgggagcaaatatgggtatatcagacaacattttcacaattcccagccatcttttttttttttttacatatttttatctcaagtaaaaggtcttgttgtccattatcaatacagagcttccttcctttaaaatattcatctctaagggtaggcttttggttttgattttgttaaggaaagggctgtggcatgccctctgcccacatgaccttcctcatctgcctgagacgtcatccttcaggtccagccaacattttcctcctcctttgaagccttccctaactgctcctgcccagcgtcctcaccctcctctgaagtcctaactgctctatctgaaccatgtaattttatactgttttgctatctctcctgcaagggcatttgaactctttttttccctttttttttttttttttttgagacaaggtcttgctctgtcacccagactagagtgcagtagcacaatcatggctcactgcagccttgacctcctgggctcaagcgaccttcctgcctcagcctcctgtgtagctgagattacaggcatatgccaccactgcctatataatttttttttttcatagatatgaggatctcactttgttgcccaggcttgtctctcattcctaggctcaagcaatcttctcgaagtgctgggatcacaggcgtgagccaccacacccaacctcatttaacccttgcttagtgttttagttaattccatttagaataaaacccaaaatcttttcatgctttacaaggacctttataatcctgctaccttccaaactccctactcctcccttcctccctcccttggcctcagccacactgcccgttccggtccttcagatgccaaacacacttctgaatccctagtagctagaacactcaatgaatgtctattgaattaattaattaatttaaataaagtttattatctcgccataaaaaatgaagtctgtgcttattttagaatttcgggaaatataaaaatgtagctttaaaaagccctataggttgggtgtgggggcttacgcctgtaatcccatcactttgggaggccaaggcaggtggatcacctgaggtcaggagtttgagaccagcctggccaacatagtgaaaccctgtctctactaaaaacacaaaaattagctgggtgtggtggtacacgcctgtaatcccagctacttaggaggctgagacaggataatcgtttgaacctgggaagcagagaggctgcagtgagccaagattatgccattgcactccagcgggggcaacaaagcaagacttcatctcaaaaaaaataaaaagtaaaaagccctatataattccacatttgagaggcaaaacataatttataccttttaagaaatatttctttccagtcgttttattatttatggcattttggttggtttgttttaatatggtgtgttcacaatgtattttatgcagaatttgacctttttatgtgtgtatgccttgtttttcctgttatgtttatttatttatactgctcgttattcaaaaataatttgaggccctattgtcagaggcatttgaaccagaatgactccatcttgaatcggggctgggtaaaataaggttgagccctattgagccgcattcccaggaagttaggcattctaaatcacggaatgagataggaggttggcacaagatacaggtgacaaagaccttgctgatacaacaagttgcagtaaaaaagccagccaaaacccactgaaaccaagatggccacaaaagtgacctccagtcattcttattctccgttctatgctaattataatgcattagcatgctaaaagacacgcccacctgcaccatgatagtttacaaatgctatggcaacatcaggaagttatcctatatggtctaaaaagggggaggagccctcagttctgggaattgcccacccctttcctggaaaattcatgaataatccaccctttgttttgcatatgatccataaataactataagcagtcgagcagcccacgctgctgccctgcgtatggagtagccattgtttattccttcactttcttaataaacttgccttcactttactctatggactggccccgaattctctcttgcacgaggtccaagaaccctctcttggggtctggatcaagactgctttctggtaacactatgagatatagaagtacatacagtatttctttctgttgcctgcagcatgcaatcctgtgctttgttcctaccaagtgtttatggattgaacagggaattgagtctggggaagcttgttttccagtggagggcaggtggatgtgtgattttgtctgacttttggaagtagccaggacctcccactgttaccatggtgtatctttggaactgagttctgtctctggtcatttatttgtttccatctgtctttgtctctcctttctggaggggaacatgtccgaaggcctggtctacagtgatctccctctaaacgagaacagactcattccatcctgcagatgtgtattactcaaagtgctgtttgcacgcaaagaatgctaagtcctagcccagcaactggaacgtatcaactccttctctcccatcccctagaggcatggcccaaattgctgtaacccttcacccttccaagctctagtaccctctggcttggaggttgcaaaaaggatggcatgcataggtttcttataagccagggccctaaaattgtgcttgtggtgactggtgtaagtgattataccacatttcctcctgccacagggtcattatacaagttgttcccttcactaatacatttcaagctctcacacacatacacatacctactcccccatcagatctcagctctgatgtggcatcttcagggaaatgttccccaaaccctgcatttcatcatgtgacctattaaatagtctcaaaggaaagcactgtatatccttcttccttgcactcatcacagtttataagtatacattgttgtatgtcttgttctcccataagactgtaagctcaatgacaggagggactatatctacttttttttttttttttttttgagacagagtctcgctgtcaggctggagtgcagtagtatgatctcggctcactgcaacctctgcctcctgggttcaagcgattcccctgcctttctcagcctcagtccctcagtagctgggactacaggtgtaagctaccatacccggctaatttttgcgtttttattacagatggggtttcaccatgtcgtccaggctggtcttgaactcctgacctcaggtgatccactcgcctcaacctctcaaagtgctgggattacaggcgtcagccattgcacccgaccatacctagttttgtgcacagtgtctccagtgcttatcccaatgactagagcgtggcagcgctcagttaacgttttttgaataaatgaatgaagaatggacatttggattgaggcagtgaagagtactagttaagagagtgagatttggagccagatattcggagtgcaaacccagacgcatgaccttggatagtatcattacctctctccaccactggttctctgcctataacatggaaataacaataccgcctatttcatagcgctattgtgaagatcaagtgagggactctgtgtaaagagcttcaatcaaagccacagtaagtcctcaacatagattaactattattttctactcttttggccaacagaaatattactgtagtaaatattattttacatattttgatccactttttatgagtgttcagtagatgaaattcctgtaagttgaattgtcgcatcagaaggttaatttatttggaattaatttttgtgtctagagtgagggagagttcatatttaactctaattacagaaaaaaatatatttaaaaaaatagagtgagagagaggtttaatttttcacttttcccaatggagaggtatgggaggccaagacctctgttagttcattaaatatttatttttatttatttatcttttaaagacagggtctcactatggttctcacactagtcttgaactcctgggctcaagcaatcctccctcgtcagcctcccaaagtactgggattacaggtgtaagccaccacacctgggcacccctgttagtttctgagtctgcagaattaagacacttaacatgtagttagtggtggcaagcacttacttagctccttaaagggaagatgtcacagctccctaaggcccacatattgctcattctcaccgagatggcagagcttagacagccaggactgaattagaggagtctgctgtatctcccctgctttcaaacccaggattatggggagtcatatcattaatacaatagtttccagctctgcctcacatgacagtgtcactattccataaccgccctgtgatctacacttgatttctagatgtcttgatgtctggatccttgttaacagatttttacctgtgctataagcctagagcttttcaatttaatataagggctttccatgcaataaagatttccagcttggggcctcttcagtagcaggccaggccatggcctcttatgctagctagttaccccaataccatttacaaatttctcataaatacaagggcctatttctggtctctattctgttcctctaattctgtagaagatctttcttcatttcattctcactgtttttgttttccaaaaaacccttggctatagtctcattcaagaaaactggagaattaatttgtccaaattgtgccctcaacccctgcaaacatgcttgtctacatgcgtgtgcatgcatgcccacacacgctcacacacacaacactctcgcacactcatttttccactagaattttcactggaattacattgaacctttgggatagtttggagaagattgatttcttttcagtaccaaatttcccatagaacatggaatatcgttccttttattcaggccttctgttttatgtccttcagtaaaattttatagttcccgtatgtaggtctcatgcatttggtattctttgttgccattgtcagtagggccttatttattatattttttcagttggttattactgaatataggaacaccattttttacttttgctacttactcataggaagaggtgaactgagaacatttgagacagatggctaagctgattttagctgccatgttacaggcagagtgctaaatcagatcctataaacaactcctaggcagggattagaatgacctatgggttgttcacagggcgtgaagtaggcacaatgggccaataacacctttacctggtgtgattgctaaatagcaccggatacagatttagcttttaacttataaatattattcctgaacaatccagattggtttgcagaataattaatttatagcagcctaggcaaggtggtattgaagcatctttttagatgatccacttttatctgttttagaaggtttggattttcttagagtgccttccttacagcacgtatgaccagtttcatgctgctactagcctagggcttgaagttatacaaactgtcttttgatctttggtctttgtcatcaagataagatcttgtactgcttatttatttatttatttatttattttgaggtggaatctcgctctgtcacccaggctggaatgcagtggtgtgatcttggctcactgcaacctctgcctcccaggttcaagcaattctcctgcctcagcttcccaaggagctgggattacaggtatgcgccaccatgcctggctaatttttgtatttttagtagagacgaggttttgccatgttggccaggctggtcttgaactcctgacctcaagtgatctgcctgccttggcctcccaaagtgctgggattacaggggtgagccaccatacctggcctttttatttttaatataaccattttctagcgatataattcacatgccatacaactcacctaatgaaagcatacaattccatggtttttagtgcagtcacagaattgaacacccatcaccacagttgagttcaggacattttccttgccctaaagagaaactctgtactgatgagtagtcagtcccatttcccccaatcctcctcagctgccggtaaccacaaatccactttctgtctctgtggatttgcctattctgtccatttcctataaaaggaacaatacactatgtggtcttttgtgtctggctcttttcacttctcaaaatgttttcaaagttcatttgtgttgtagcatgtatcactacttcattcctttttattgctgaatactattctgctagacagatacattacatttgacttatttattcatcagttgatggacatctgagttatttatactttttgactattatgaataatgctactatgaatatgcatatacaaggttttctgtggacatatgcggacatttctcttgggtatatacctaggagtgagattgctgaaacatatggtaactctatgtttaaacttttgaggaactgccaaactgttttccaaatcaactgcaccattttacattcccaccagcattgcaggaaggctctgatttctccacaaccttgccaatccttgttattacttgtctttttggtgattgctgttctagtgggtgggaagtgatacctctttgtggttttgatttgtattttcctgatggctaaaacttactgtttcttgactcttttttttttttgacagagtctcactctgttgcccaggctggagtgcagtggtacaatctcggctcactgcaacctccatctcccaggttcaagtgattctcctgcctcaacctcccgagtagctgggattacaggcgcccaccaccatgtccagctaatttttgtatttttagtagagacggggttttaccatgttggccaggctggtcttaaactcctgacctcaggtgatccacccgcctcagcctcccaaagtgctgggattaaaggcatgagccaccacacccggccgactctaacatttaagagctctcttttgcctttccttggagctatcctggctagattcgtgataggggtttcacacttattttttctctgtagattccagaaacccacacatgtagacaacgtgccatatgattattgttattcttgccgaaggggtgaggcctaaacagaatctcaggaggaaaaaagaatctagaatgtgtgcagcatatgtccaaaaaagaaaattggttgtttagatatctcaatcaatcatacacccttgtcacaggcattacaaaactcaaactaaatcaggaaacaatttttttgactggaagccctcatttatcactaactcttagtgattcacttgaagaaaaattaaggtgtcctatttgacatgaaaatgctgcctgtagtcttgttaagttctctatgagcatatgctgattgacttaagatggcagtgttaagaatggatgggtaagaaggaagtatagtgtgtacttataataaagattgtggccagacgcggtggatcatgcctgtaattccagcactttgggaccctgagatgggtggatcacttgaggtcaggagttcgagaccagcctggccaacatggtgaaacccatctctattaaaaatataaaaattagctgggcgtggtggcaggtgcctgtaatcccatctacttgggaggttgaggcaggaaaattgcttgaacccgggaggtagaggttgcagtgagctgagatagcactgctgcactccagcttgggcaacagagcaagactctgtctcaaaaaaaaaaaatctctaagctaagggtacaagtgccaacagagctcaggttactcagagaattatctataaggagataagaaaagagaaaatacatagcaagttatcaaagataagagaaagaaatggaagaaaaagccaatgcttttgtcaatgtgagggcatctaaaacctgagcttcagagattaaagagaactggaggctcagaaaggcttagctgtggcaagtggtataataaactggctcccctgtattcagtgcttgctgtatgtaaggcatgaggccaagtgtggcacataaattcttgcatttattcctcatagccccctatttcataggtgaggaaaacaaagttcagagacattatgtggctttccgaagtccacaggtggtatttgaaaccgagtctttctggattttaatgactcagaactaagggtgtttctgcaaagtaatggaatatagcaggactattctagtctgagtataaatagaataagaagaaagtagagatttcttagtaaactgccaagagaaagacccagattacaggcaacgttagactcagataactatatgagagaattaagactaagggttctctaagaaaaggctaggacttacaaagacttagatggtctctataattatatgggaaaaccaatgaccgacttatccatgcacgcatgaaactgtgtgtgagtagcattctcgccgtacccttcatagcccaataagctctcccatctggagctgagtagggctgttactttcaagactggcgttgttatattttcctgggaggagtgaggcattgtcagagagactaaaaaggaaaagatgacacgactcctgtcaaagctctaggaaggaggtcagtcccttgggtgacggaggtggacaatgaaaggcttgcgaggccttgtcttttactccagctggtgatatggccttacaagttgtggctgcaacgaacattctgacttataacacaaaaaggccatccaacccccacgtttctcaaagaagcatcaccactaagtgatgctttggcagttttcagagtagagccagcataaggaaccattgcttgtcctagtagctcctccctgagacacgcctttatgactgagacctcctggagccagggcctggctaggagaatgagcagtttcctgaactggacagcttggggattataaagatcaaaagtcctgggtgcatcacccttcattcatcacatgttaataggggctagtttggactctggccaggggtggaaaattcttcctgcacctccttttacaggctttgtgtcaatcagcctttgtttcctcggttgggatttgtctcaggagaatcccaaaccattccaatatggaacaatcacaaaggcatggactgtcagaattaataggcacttagaggaccatgcagtcatcaccaagcattttgccaaagcttggaagtgagcagcttggtttgaggcatgctacagagtcagtaaggcccatgttatgggacaggcatagccgcaggagcaccccttgcttgcaccacacctattttttttgaaccagcgtctcagtctgtcacctaggctggactgcagtggcacaatctcggttcactgcaacctccacccaggttcaagtgattctcatgcctcagcttcctgaatagctaggattagagcatgcgtcaccaggcctggctaattttcgtatttttagtagagacagggtttcaccatgttggccatgctggtctcgaactcctgacctcaagtgatctgcctgccttggcctcccaaagtgctgggattacagacgtgagccactgtgccacacctttttttatgaaaaactctgggcttttaaaaaatgaacatttaagttatatcttcataaggaattgtgacagagagacattggtggacggtgaggagaacagagagactgtgcagatttagattttgagtgtatctcccacctcagccccacctgaaggaagacgtgttgagggtctctaagactacccacaggtttggtaatttgctagaaggaattacagggtgtagcatatagttatacttgtggctaagatttattacagggaaagggtacaaagcgaaatcaatgaaggagaaagctatgtgggggagtccagagaaaaccaggcgcttccatggtcctctcccagtacagtcacaaaggatgtgccgaattcctccagcaacaaattatgacaacacacagcaaatgttgtctaccaggctgggcacagtggctcacacctgtaatcccagcacttcgggaggccaaggcgggcagatcacctgaggtcaggagttcaagatcagcctggccaacatggcgaaaccatctctactaaaaatacaaaaattagctgggcattgtggcacatgcctgtaatcccagctccttgggaagctgaggcaggagaatcgcttgaacccaggaggcagaggctgcagcgagccaagatggcaccactgcactccagcctgggcgacagagcaagactccgtctcaagaaaaaaaaaaatgttgtctaccagagaaactcatcagactcagtgcccaaggtttctacacgggggttggtcacatagacaccctctgcctagcatgtacaaacactccagacttccagaaggaaaactggtattcagtataagtataaagcatgttgtttgcacaaatatgacctaggcctagtgagccactcttatcatttagtttcatatcggtatagggaactctttaccaggcaagttcacagaagtcagccaagatccagcctttcgaggcaggcctttctcaggatagcaatctcaggccctctatgtggatgctttactacacagaaaggtaatctcatttcattcttcattgttagaacttagtaaattgccatcaataaggtaaatggaattgtttacgatcaaaaaccttacactcacttttctaataggtcacctctatctgaatgtcctaagatacttcaaacctagcatgtccaacactgaactcattatcctccccacattctggctgtttcttttgcacacatgttcctagtgaacagctcccccgtctctcctattgccgaatttattcttaacgtctacctctgttataccccccgcaacttaacgagttgccgagtcctagagtttttactgcttaaatatctctcggttttcttccttagccctactgccacttccttggttcaattttgtcatcttgctgtaggacagtggctttgtaataggcctttctctttttttttttttttttttggagaggagttttgttcttgttgcccaggctggagtgcaatggtgcgattacggctcactgcaacctctgcctgcagggttcaagagattctcctgcctcagcctaccaagtagctgggattacaggtacctgccaccacgcccggctaattttttgtatttttaatagagacgggttttcaccatgtcacccaggctggtctcgaacctctgacctcaggtgatccgcctgcctcggcctcccaaagtgctgggattacagatgtgagctaacttgccctgccagtaatgggtctttctctatataattggtctctgtatctgcaagttccacaccacacccacagattcaaccaattttggatcaaaaatctttgaaaaataaaacacattcaaaaataacaatatatctatgttgggttaagataaaaaattatttttaatataaaagtattttttaaaaaagaaaattaaataacaatacaattaaaaattatacaaattttaaaaatatagtatagcaactatttacatagtttacattgtattaagaattatatgtgaactagagatgatttaaaatgcaggagaggctgtgtgtagattgtatgcaaatcccatgccattttatacaagggacttgagcatccatggattttgatacccataggggtcctggaaccaattcctcccttcacccgctctctgcacataccaagggacaactagaatcactcttttttccccactcatcatctatgctgtaaagctagcagtttttttctcagttttcctttttcttaaaaactactttttaactttctgagattcactaaactatttatttattttttttagacggagtttcactcttgctgcccaggctagagtgcaatggcgtgatctcagctcactgcaacctctgccacctgggttcaagcgattctcctgcctcagcctcccgagtagctgggattacaggtgcgtggcaccacgctcggctaattttcgtattattattattattttttttagtagagatgggatttcaccacgttggccaggctggccttgaactcctgatctcaggtgatctgcctgcctcggcctcccaaagtgctgggattacaggcgtgagccactgcgcccggccaaactgtttcttttatttaaaaagtaataaatgcacatggtagaaatccaaacagtactgaaagatatgcaataaaaagtaagttctcagctgggagtggtggctcacgcctgtaatcacagcacttcggggggctaaggggggcggatcacctgacatcaggagtttgagactagcctggtcaacatgacaaaactccatctctactaaaaatacaaaaattagctgagtgtggtggtgggtgcctgtagtccaagttactcaggaggctgaggcacgagaatcacttgaacccgagaggttctatgagaccagatcgctacactgcactccagcctgggtagcaaagtgagactccgtctcaaaaacaacaaaaaatgtaagttctctcgtggttcccttccccagagatccttactgttgacatttgttgtctctccttctacaagttttctctgcctgtaaaagcatatccttaaaacatacatgctttccacacctcacacacaagtgggaatccactgtacacactggtctgcactcggctcttttcattgactatgttaccttagagagcttttctcatctgtaaatgctggtctctcattctgttagagcactgtagtattccagtggatgaacgtatttatttaaccagtttctcttgatggatatttaagttattcctaggttcctgctattctgaagagtcaccttttgaaaacgcaaatgtgctgggtccgtccctggctcaggcatcttaaatgacttcctgctgtttacagctaggcctccagctggggagtcatggatgcaagcaggttgccagggatacccgaggcctcaagagaaataatggcatgtgttcctggagttctatgtaaaaatgttaattgaactgctaagtggttaaaatgttttatatggagtcaacacaattctattatggtgtcaaatatagaattctcatgcatttttcagatggtggtgggagacttcaaaagaaatttgtggaggttttttcaagctacacttccagattcccctaaaggctcatgttttcctttcttgcctgaaggacatcagtggaaagatctgagcacccaagtccacaggatacagccagagcctactggcatagatttgagagtccacgtttgatgcacgtagaactacttgctatttttcctattccctttgcctggaaggtttctgtccttttccatctggtatacttactactcatcccaaaaggcagtaagtacagcctactgctgaaaagtatggactttggagccagactgcctgggtttgaatcctgaccatgtcatatttctagctgtgtgatctcgggcaagttacttagcctctctgagactcaatgatctcattgtaaaatgtaggtactgaaagtaactggtaagactgttatgaggtataagtgggttaatatacgtaaagtgcttagaacagtgtttggtacgtggttagcacttgatgaaggtattgttgttaatgttattatttttattactcaaggtctagtttccatgattctcccaggtaccttcttctgccttcccataacatctgcttacagtactcagcacaatattctgtactttctcctcccctttagggacgtgctcttttgcagagaggaccctgtcttatttatcctcatatcccttgtgtgggatgcatactagacaatcagttgctgttgaataggtgttaactgaatgagataataattataataataacataattattataataataatctgaattattatatctgtctgtctatttgattatgcagtgaccagtgatttttggccctaaaggggcttttcacagaccccaacatggtttgtaaataaaaacttcactgtagaaaccattcacactaaaccagtgcttctcaaactgcgttcatgcagtttatgggcattttccgaacacaggttccctaggtttgggaaattctaggttacataaaagtaaacagatatcttagagccttttctaggctcatgtccatagaggaatgagtggaacgtgggattcggttagtaaatttcttaatcttttttgaccagagcgctttttttttttttttttttcgcggaaggtgaaaacatctggtgggttaattctatggaatatagttgttgataaattgcacgaacttagctccattctctcttccagctgatttgcctagagcctgggagtgtcactgacgtgccatttcctgccctgacagcatctccgcttccgtcctgaaacctttatcaagaaacaactgtgcagcccacgaatccattcagtcaagatgtattgagtttctgctatgtgtactgactgcggggaaaacaggattcttgtcctcgaggaactagctggggactcgggacagagtcaaacacatgcaacatgaggcctggtatgttagatgggcagagagccgggacactgctggctgcgcagggagatgggggccggaacgtttttgaggaggatgaggctttgatttctctggtccaatcctctcagtgtcaaggtgggtaggtggggagattaaagtctagagagtggtaggtgttttgttttgttttgtgagctcaaacaggtagtcaggggcagactgggaacaatattgtattttcccattgcatcacctgcctctgaggctcaagtatcaaaatcagagaatccgttcacacaaaaagacgaaaccagggaacacttccttccttgtagctgcctgtgggtccctgaacttgttgaaggccattctgggttggatatcttttccgcttccattttcctatcaatgactcaagaccatgtcttatttttatacacatttgttttctcatagcttccttctctaatcatttcttggcgaagatgtttgtggcttacaacatgctgcagtcaaagcagggcacgctttggaagccagagggcgaggttcggctggctgcggtttgccagtctggtaattgccagtgggaggaaagtgacacagcgagagcagggccttcagaatgccaaagagtttgcggtactgcggtccctggtgttctgtgcagatactaagctaacaggaatgtaatacaagcacagcagattggaatgaaataggccacccactctcactccaggctcctcagtagctgccctgcctgctcatccgggggcccaaggctcactcggtgccaaggaactagcgtcaactccccaagaacagcactgctcacttcccccagcaattcttccctgctttcagaatgaaatccacatccatcctctgagcctccctggtcttctgtccctatcacaacgtctcttctgacctccctatctgctccgcctgctttgtcaagaacatgcccccagctttccctgtcttgagcgtttcctgacactgtcttctgcctctgtttgttgaaatcccaagactttttcaaggcccatgagccattcacaattgtgttcagctgcatataagagaagtgctgctatttggctgaaccaaagagggattcttttatttcatgcaacaagaagtgtggggacaggcagtctagggctggggtggcagctcaggaatgattccatccaggaaccaggttctttccatgtgctcactcctctttctttctttctttctttctttctttctttctttctttctttctttctttctttctttctttctttccttccttccttccttccttccttctttcccccctctctccctccctccctcccttcctcttgagacagtggtctcattctgtcacccaggctggtgtgtagtggcacaatcacgactcattgtagcctcgtccttctgggctccagcaatcctcccacctcagcctcctcagtagctagaactacgggctcactgcaccctctgcctcccaggttcaagcgattctcctgcctcagcctcccgagtagctgggactacaagaacccaccaccatgcccggctaatttttgtatttttagtagagatgggatttcaccatgttggtcaggctggtctcaaacttctgacctcaggtgatccacctgccttagcctcccaaagtgctgagattataggcctaagccaccactcccagcctccacaggtatgttttgatttaaactgaattgaattaaatgggagaatgatggtatggctatcggaaagggtgttggatgtagaattacaaaacatgaatttgaatcctgatatgaccacgtgactttgtgtgaatcacacggacctcagtttcttcatctataaaattaggagactcaatgaaatggtctcaaaattttcttccagctttaagaacttggggactcttatgaatggaatcaattagctgcattagggaattccaaggaggtggagcccattcaggcccaatgacagccagtaaaacagggaatggagaaatccgggcacttctcactcaatcctatagtttatgggcccaagacaagcctagaggggcagaaaggtgagagctggaaagtaacagggaactgggccagaccagcatggatcaggaggctggagatgagaggtcagtcctggtgtaaataaacaagtgctattttaagaggtcgcctttcaggaagcaggaaccctccactgcccagacattgaagccctactgaacctcacctcctaatgacaagagaaggcctctcattatgactttggcacagtggcttatgcctgtaatcccagcatgttgggagcctgagtagggaggatcgcttgtgttcaggagtttgagaccagcttgggcaacgtagagagaccctgtctctacaaaaaataaaaaattagccgggcgtggtgggacatgcctgtagtcccagctactcaggaggctgaggcaggaggatcatttgagcccaggaggttgaggctgcagcgaactgtgattctgccactgcactcaacctgggaaacagagtgagaccctgtctccagaaaaaagaagagttcctttaagtttaggcgaggtagagccccacatctggcatcatgtataaactggaatgaatagccagtgtgtctgtctcacattcctatttggggatagagcaagacttacgggttgaaggcccaagccttcccttgtgttactttgagcaagttaattttcctctctggacttcaggttctcgtctgtaaaagacaggcattggtatataacactggtgtttaaattctttagaactggaacaaaaacagaacaaaagcttgtataggttcccgaaacagcaagccatcctcttggcaaggaatccttcaggatctgtggtgtctcggaagcacctctgaagacttggggccacagtataaaaatgactacactggtgaccttgagctccctcccagctctctgaccctgtgtctttcctggttattatttttttcccccacatttcttatctactgaagactgacgccaagtattggtgtttcttttagacgtaactgagttaagaagctctcgccatgactcgatcacaagctggcaggtttcgcccctgtactttgcttgattcagatccttcctcattctctttattgaagttttaagttcttcattttcccttccccaccccaatacagggcttggttctcagccccttttgtccttaccatacacattcattcatgagatgctatgacaaattcagtaattcctatcccttgtctccaagtttagtgagtcatgagcagtgaagctgatgctaaaaagaaatgtcacacctggatgggactgttgaatctactcaatgcctcacctcagaagtggaagttgctgacttcaatattttgtttttgtggtctcttgagggaaagaccttttgatgctggcttcacaagtgacctgccagtccagtttcactagcgcttaccaagtgataggtaacacagccaaaatttgtgattctcgcttgaacccaggaggcagaggttgcagtgagccaagatcgcaccactgcactccagcctgggcgacagagcaagactctatctcaaaaaaaaaaaaaaacccacaaaatttgtggttctttatcctcctgtttcaacttattaataatagtaatgatgacaataactacaacaacactcagctatcatttataaagtgtctacaaggcgccaagcacagagccaggtgctccacatatattatccttcattttcataactttagaaggcattaatagatattattgaccttactttgcaaatgcattaagtctcatggaaattaagttctttgcccaaagttgcctggctaatgagaagcagagcctagattcaaacccgagtctgtctcattccaatattcatgttctttccacctctccgtgaagaaatagtatgccttttttggggtgttgaagatttgtgacaattttgataagtgaaagcaaaaagggaaagagaagagaaaaagctattaacttaaaatccgttacaactgtactaggaaattaagtgagaataaattataaagtcaaatctaatttctgaggggaagacactgactgacatagataaaaacatgtttatgtgacccttaggtaaatcgttccaactctctgagcctcagtgttgttatctacaaatgggagaatcaaggcaccctcctacaagcggcggctcatcagctcacttggaaaatgtagtcatcttctcaaagttttctttttctttctttctttttcctttctttctttctttttctttctttctctctctctccttccttccttctttccttccctccctcccttccttttttcttctttctttcattttctttctttctctctttcttctttctcttcctttctttccttccgtccctcccttccttccttttttcttcttcctttcattttctttctttctctctttcttctttctcttcctttcttctttcttttcctccttcctcccttctttccttcccttccttcttccctccctccctctttgtttctttctttctctccctccttccctccctccctttctgtctccctctttctttctcttttttcttttccttccttccgtctttttcctcccttctttcctccctcctccctccctccctcctccctctttttctttctttctttcttttttctttctctcttctttttttttttttttttttaagagatagggtctgttgcccaggctggagtgcagtggcatgatcatggttcactgcagccttgaactcctgggctcaggtgatcctcctacctcagcctcctaagtagctgggactataggtgcatgccatcacacccagctaattttttaaaagaaattttgtaaagacaggggtcttgctatgttccccaggctggtctcaaactcctgggctcaagtgatcctccagcctcagtatcccaaagtgctgggattataggtgtgagtcactgcagccagctcaaatattttcttaaatgaatgtaaggttgaggatgcattattataatggctaatttagatctaaaaaatgctttgcagtttaccagattcacttatgtacattctcatataattctcctgataatcccttgaggaaggtgtcctcataactagaatcttagctaacaacagatcagcgaatgttgattgaatgcctactgtatgccaggttattcttgaatctgaataggatacagagttgactaaaatagggatcccatgtgacttttgttttatttttattattttcccacaatgaatttatcactagaaaagattatcttggccgggcgcagtggctcatgcctgtaatcccagcactctgagaggccaaggtgggcggatcacctgaggtcaggagttcaagaccagcctggccaacatgatgaaaccccgtctctactaaaacaaaaattagctgagcatggtcgtgggctcctgtaatcccagctactcaagaggctgaggcgggagaattgcttgaacccgggagggggaggttgcagtaaactgagatcgtgccactgcactcccagcctgggtgacagagtgagactccatctcaaaaaaaaaaagaaagaaagaaaagaaaagaaaagattaccttggccaggcacaatggctcacaccagtaatcccagcactttgggaggccgaggctgggggatcatctgaggtcaggagttcgagaccagcctggccaacatggtgaaaccctgtctctactaaaaatacaaaaattagctggggatggtgacaggtgcctgtaatcccaggtactcaggaggctgaggcagaagaattgcttgaacccaggaggcggaggttgcagtgagccgagatggcaccattgcactccagcctgggtgacgagtgaaattccgtctcaaaaaaaaaaaaaaaaaaaagaaagaaagaaagaaaagattatcttatctctcacccaaagaaagacaagacaagaaaaaaaaaattcagaccgtgccccttcaaggaaatcaagtctagtggaaaaggcagatgtgcacagtaaaccaacacacaatgcagatctgatcatgggaagttttgtcaaagaaatacaaacagatggggcaattaatttggactctaggagcaggaggcctttaaatgctctgtgaatccctgtccagcctgcctcacagagtggtgtcaaagttccataaaatggacaaaagctcttcagtcttgcacatctgtaaaggattgattgtgatgattttcgttcatgtttcccagcagagttgggagtattgggatttctgttttgctgggacaattgtgttgtgccagggatgtctgaggattgtcttctgatgttgtgagtcttggaattcacattaggtatggcagcccggaagccgctaggttcagttctaccagtatattgacttttaaccccgttcccttcttcgtccctctccctccaccttcttgggttatactatcttcttccttcttctcccttcctatacatctctttcatccttttttaccttttttctcactatgttggggtctccaagaccacccccaggttcactgcttcactaggagatgtcagaaaactcagcatatagttgtactcacagctgtgacttttttttttttttgagatggggtcttgctcttttgtgtggtgtgtgtgtgtgtgtgtgtgtgtgtgtgtgtgtgtgtgatgggtcttagtgataattttgctgtaaagacgcctcatccagaaaagagttggcatagcaggcctgagactgccattcttagagaaacctgttcacaagtttggcttttttcttttctggagtgcagtgctgtcatcttggctgactgcaacctccacctcccaggttcaagagattctcatgcctcagcctcccgagtagctgggactacaggcgtgtgctgccatactggctaatttttgtatttttagtagagatggggtttcaccatgttggccaggctggtctcgaactcctgacctcaggtgatccacccgcctcgtcctcccaaagagctgggattataggcacgaaccactgtgtccggccacagctgtggcttattacagggaacaggtacaaagcaaaatccataaagggagaaggggatggggcaaagacaggggaaaccaggcccaagcttttggaagtcttttcccggtagagtcacacaggacatgcctaattcctccagcaaaaaattgttacaacacatgtcaaatgttgtctaccagggaaactcaatagagactcggtgcccaaggtttcttctggggatggccacatgtaccctccacctaccatatacaaaaattccggatttccagaaagaaaacaagtgttcagcataaaccatgttgtttgtacaaatggtttagtgcagtgagccactctgatcacttagggaatggtgagaaccctccccaagtctgtgttcccaaatgcccatcaaaagccaaacttggctgggtgcagtaggctcacacctgtaatcctggcattttgggaggccaaggccagtggattgcttgagtccaggagttttgagaccagcctggacaacatggcaaaacctcatctctacaaaaaatacaaaaattagccggacgtggtggcacatacctgtagtcccagctacttgggaggcagaggtgggaggattgcttgagcctgggaggtggagattgcagtcagccaagatcacaccactgcaccccgcacccaccacacaccacctcccccccgcctaaaaaaaagccaaactcgtgagcaggtctttctaagaatggcagtctcaggcctgctatgccaactcttttctggacaaggcatctttacagcaaaattatcactaggacccatcagcaggatgagaccaacctgccgtactgatcctatcagttatatgccttttaggagccctgtacttagccaggtaaaacaaatcccatcagccataaagatctttaaaggtaaactttaaagtatttttatgaacgttttttacctggcccaaggcagcaattcagacacagtgcagctctgtccaataagatgaagctgacctgaatcccttccagggctaaggcagtgttgtcacaggagaatacacacacaagaagtccagccccagagggcacatgttgtacccctggaaacaaagagttgacaattattggggcaccccaagctgcatacattagcagaacaggttgacaaggccccaagtgtgacctcccatcgcagggctcccaccctaggcttccagtttcattcaattaaatcagttcaggctttggtttcagagggactgcctgaggatgtcagttaccaatggtttgcttgtctgtgacacaagctcgcctgcttcctgagtgtgcaggacctcggggggtgttctgtgcaggaagtggaggggctgggtcgccccctgctgctcagcgtgtcagagttcagagttctcccagaattaggaaaggcagcaccgggagttttcccttcaggaagaaaggagagcttccagaagcagttctgaaagacaaaggatattaaagccctcactgctcccctgcacctcccagggtactagggtttctgtcatctctctgttgtttcaaaatcggtgtgtcgcattcagccatcataactttacattttaaaaaccatcccctgctgtcatccagacctctcacctggaagggttgtatgcaagagggacaaaagcattttcatcaaaaaacggttttatataacttaaccagaaagatacatcatgctcaggaatgggtcaaggagggaatcccgaattttcaaaaattttcaaactgggtttatataacctcccatcccttttatcctgagcagcctggaaaagctcactcacctactgggcacagttgcacttagtaaccaaaatgcctcactaaggtgtgtgtcccaggacagagaggcatggagccaggctattggtccattgttgcaaactgcaactagtcctgcaagttgaacacaacaatcaacagcagtgaggcatctccaagagggggtcgagggtccacctatcaggagtgagcaaagggccctggtccctgtgatgtgccctccctgacctgcagctttcagcagtaatctcaagtcagactgcaagtggtctctgtatcagaaatacagagcctatctgccacctgatttcagatggtcccagcagtgtataagccttttcctgtggacatttgtatgggatccagacaatccagccagaatgttctcatagtttagggccccaaagaggtgtccagtatctatggcaatcctggagtcaaagtcaagccagtgcctcttcagctcagcacagctggagcagaggctgaaccagcccatggcagacagcatcaggtttcagctccatggagcccaggcaattaggggcagagaatgcaagattccaaaaacaccaagggtatttctttgactgcaaaaaaggcaagacactggagggccaaatcgctgtgttccaagtctgaatgacaagcgaggctttcctaaaccctttgtctctgtgccattcttaagagtccaagttgacccacagcaggctggaaaattatcagcctgtaaggatcggatttcacaacatctgatatgatttatgggagctcattagcaattaaagcctgctttttaaaattccaaaagtggttttaatctggtgagtggctctcttttcacgctgattgccttttcctagaggctctgatcggcaaacatggtagtaaaaatcctcactatggggacttactctatttctaatactcaaaacagtttaatttgctcaccagtggcaaaaaccaagaaagatgtgtcccatctctctatatatttttgcagcttttcccaattgggatgatcactctagcatttatgaaattataaagcctataatacttctcatccattcttgccatacatccagatccaatagccacaaatacgaagccattaaaaacaataaactgttttcttgttgcatatttactcaaacccttagcagtaaattcagcatttacagctgccaggagctctggctggagtgcaagaagggaaaggtgtatagtaatggctgcacctctccccctcccaccccatctgcttcctctctgctgtatctaagtgttgctcctgggaattgattttttttcctcccacctggagaagagagtgatgcaaatttttttttttttttgagacggagtctcactctgttgcccaggctggagtgcagtttcgcgatctcagctcactgcaacctccacctcctgggttcaagtgattctcctgcctcagcctcccaagtagccaggacgacaggtgcgtgccaccatgcccagctaatttttgtatttttagtagaggtggggtttccccatattggccaggctggtaaatttttaacatctttggcccaaagctaaacttttgggatggctgggcctttttcctcccacctggaggatagaacaaaatgaaagacattgagcaagctgaccatttttcccctcactttagccagcactgccaaaagcacccaggatgtccggcaagccagttctctgggattggagcgatcattttcaaatttcatcggtaacttttacctcttgcagcagacagtaactcagctggggtttcacatcattcatatccacagatcttccgctccttcatccttccttttctcaaacagcactttcaccatatatcagagccaaggtccttctagtgaggtccacttatgatgctctgtgccaggggttcccaggaccacctcaggttcagtggctcactagggggactcccaggaccaccatgtcattgaactcacagctatgatttatgacagtcaaaggatacgaagcaaaatcagcaaagggaaaaggtgcatgggtcaaagtctggaggaaaccaggtgcagacttccagttttctcccagtggagtcacttaaggatgcacttaattcctccagcaacaaactgtaacaacatctgtgaaacgctgccttccagagaagcttgtctgagcctggggttccaaagcttttatctgatcagtcatgtaggcacctctgcctagcacataccaaaattttcagactcccagaaggaaagcaggtgttcagaataaactacgctgtttgtacaaacagtttagtgccaaccttaccagcagggctttctaacgttaacagtctccagcatggtatgttaattcttttctacacacatcttttgttgttgtcgttgtcgttgttgttgttgttgttgagacagggtctcgctctgttgtccaggctggagtgcagaggctcgatctcggctcactgcaacctctgtctcccaggttcttgtgcctcagcctcctgagtagctgggattgcacatgcgcaccaacatgcatattttttgtatttttagtagagaaagggtttcaccatattggccaggctgggctcgaactcctgagctcaagctatctgcctgtctcagcctcccaaattgctgggattacaggcatgagccaccgtgcctggccttctacacacacatctaaaaagaaaggaaagtgaatggaaaatagagaagaaaagagaaaaataacacaaaaaaagagtgaggctgaaaaggaaaagaagaaaacgttgtctgaggattttaaaaacattgtagagaaaataaattgttgtataataatgtcataagaagtaaaaataaatacacaaaatcatggaatgccctgaacttgtactttgaggagatcattctagtcccagactctggatgcaagacaaccccaccaaagtattcagcaaaccctatgtttttgtttttgttttttgagacggagtctcgctctgtcgcccaggctggagtgcagtggcaagatcttggctcactgcaacctccacctcccaggttcaagcgattctccagcctcagcctcccgagtagctgggattacagtcactcaccaccaggcgcagttaacgtttgtattttttagtagagactgggtttcaccaagctggccaggctggtctcaaactactgacctcaggtgatccacccaccttggcctcccagagtgtgggattacaggcatgagccaccgcacctggctgcaaaccctattttctttctttctctcgctttctctttctttctttctttttctttctttcttccttcctttctttctttcttcctttctctcgccttctctttctttctctttctttctttcttcctttctttatttctttcttcctttctctctctctctctttctttcttttctttttttttcggagatgggatctagctatgctgcccagaccggtttcaaactcctgggttcatgcagtccccctgcctcaaccacccaaatcattgggattataggcataagccactacacccagcctattttaacttttcaaaatagcaaaattctttattcaaaatgaagccttgcttagaagcccaattaagactcagaaattgagctactgtgagcctagtgggtctggggtcataccctgcttccccatactcttgaggttccatgaagcacaagtgaaaaccactgatttagcaccatctcttttatttttcagatgatgaaatcaaggcccagctaactaaagtttcatagtcttagaaatagaacccatttatttggaatcccagctcatttgctttttttttttttttttttctttttgagacagagtctcacttcattgcccaggctggagtgcagtggcacaatctcggctcactgcaacctctgcctcctgagttcaagcaattctcctgcctcaacctcccaagtagctgggaaatacagatgtccgccaccatgcccagctaatttttgtatttttggtagagatgaggtttcgccatgttgtccaggctggtcttgaactcctgacctcagttgatccacatgccccagcctcccaaagtgttgagattacaggcgtgagccactgcaactggcctcattttgttcttgtgctattttcagtaaattctaagtgtcccttgaagaaaatgagtgaaagccaacatttcctggtaatctcctgttaagtacatttattcttaaaacggattttttttaaaaaagacaaacaaatgatctggcttttggaaaattctccaaagtaagccatgctgttgcatctcattatggacaatcagcttgttctttttctttagagatagggtcttggtctgtttcccaggccagagtcctgtggtgcaatcatagctcactgttgccttgaactcctgggcttaagcaatcttcccacctcagcctcccaggtagctgggactccaggcacacaccaccacaggggacactaatttttttatttttgtagagacggggtctcactatcttgccccggctggtctcaaactcctgggctcaagtgatcctcctgccttggcctccctaagtgctagaattacagacttgaaccactgtacccaacccagactgttctttagggtccagcagctcattctccttccagccttaagttctctggccatcctgctctcccttctacccttgtgagagtttgcacctttcctccgtgacagctatctagcctggctttgggctgaggtggtgaacatgcttattttacttcaaaggcaggtactgtagctcatttatgctctactctgtgcaatgcctagctgagcaccttcaaggtccagctaatgttcactgagttttattgaaatggatgggcttcgcagaccgattgtgttaatcggagagaggaggttagagtctagtgaacactgagaagttgcctcaaaaaacatctctttcacctgctgagtctgtggatgatattttaaaaaattaagaaaaaacatctcttctatgtcccctttaatttcacagcctggaagctgtttataaaattgatgacaaaaaaagaataggctctttatcttctagatgttctcattgggtttcacgtgtttttgttgccctttcatagcttctctcatctcgagttatatccctttctggtagtgggacgttctagtgttgctgcaaagtgtatgctttgaccaatgtagttttttgctttatcctacttgatataaaaaatatttgtgatttgcagctggatgcagtggttcacacctgtaatctcagcactttgggaggctgaggtgggtggatcacttgaggtcaggagttcaagaccagcctggccaacatagtgaaaccccatctctattaaaaatataaaaattaaccgggtgtagtggcaggtgcctgtaattctagctacccggaaggctgagaggggagaatcacttgaacccaggaggcagaggtttcagtgagccaagattgcaccactgcactcccacctgggtaacacagcaagactctgtctcaaataaaaaaaaaattgtgatttgctttagagctcaattaaccacaatgtgatattagatttggactagacatcagaagccattgagttgagtgtcctgcctgggtgccttctctgacacctcgatagtcagacatctcacctttctgtttgtccactgtggacagggaaatgacttattgcgggtgcagcacattctaggggttgataaactctagcttttggagtaacctcccttccattaagctgcagatggccttctgtgctatggcccccaggtctttactctgtcttctgggactgcacagggtataccgcatctcttatataatctttctttggtattaggatatgcagattcccaccagccaattttgctttaaaataggacattcagtaaagagcctgcgtattttgccgaagtggatagagtggtgttaggggacaaatgccttgtgatacattcagttcaacctagttgtgacctaccatacattgtaatgtttaaataaaataattttaaagataagattccatgactccatttatatgaaattctagaaaacacaaaactattgtgaaatttctaaagcagatcagtggtggccacagggtggggagaggattggctatagagaacaagggaactctttagagtaatggaaatactgtttatcatcattagagttgggtgtatactactacattactctctctctctctctatatatatatatatatatatatatattttttttttttttttgttttgagagagagtcttgttctgtcacccaggttggagtgcagtggcctgattttggctcactgaacctccatctcccaagttcaagcaattctcgtgcatcagccttctgagtagctgggactacaggtgtgcgccaccatgcccggctaagttttgtgtgtgtgtgtatttttagcagagatggggtttttgccatgttggccaggttgatctcaaactcctggcctcaagtgatctgcccaccttggcttcccaaactgctgggattacaggtattatccactgcatccggcctactacatatttcttaaaactcattgaattctgcacttgaaattggtgaattttatcattttatcatttgtaatttatagtgcaaatcaatttgtatctcagtagagagaatgagagaataggaacaccccttctctctctcgccataaattgttttcctattatttgaaatgtagctatggagccaaaacaggttctgacttgcttttttttaatgtagattttattgaagtataacatacatacagaaaagtgcacaatcattagcatatggcgcaataaatttccgcaaagtgaacatattgggtaactgtcaactagatttaaaaaatccaagatccctaatgtccctccttgtgtccccttccagtcattaattcatctccccaagtgtaattgtaataggttcattgcccaatgcacacagcaagtcaatctacatggagagacactgggttgcagcagagaaagaggtttaatcatagggtcgccaaatgaggagatgggaggaaacctcaacttcctctccttgaggagttatgatttttaaggctttgggtgtgggccaaaatttggagactgccgattgattgaggagtgccgggccaagccatggggcagggggcagggagaggaagaagctatagtctcatgctgatcgcattcatctgtaggggtcttcaaacaggttgctggaattcagggtctgaaagcatcttaagtgaccctcagacaaaagccatatgattctaatgtcaaagatcctgtctataggaacaataaggatgcaatggggaaatgattcttaaacagtcttatgatgctaatgtcagaattcctcttgataggaacaataaagatgcaaatggtcagtaactagcagtacgtgacctttagcaacaagaaagtgggccaaagcgtagcctaacgcttaattgtatttctggccagtgcctggcaggtaatttttgtcaaccctgtggagatcatttcacaagggtaaccgctattgtgatttccaacaccataatttttttaacctgttcttgaacttcatatgaatgaaatcatgtagcatcttctctttttcgttcggcttcttttttcattatgatctatgtgaaattcatccatgatgttgtgcaagtttgttcattctcttttttgttttttttagacagagtcttactctgttgcccaggctggagtgcaatggcacgatctcgggtcactgcaatctctgcctcccgggttcaagccattctcctgcttcagccttgtgagtagctgggattacaggcgcccgccaccatgccaggctaattttttgtatttttagtaaagaccaggtttcactatgttggccaggttggtctcgaactcctgacctcgtgatccacccgccttggcctcccaaagtgctgggattacaggtgtgagccatggcacccggcctctttttctaattttattttatttttttgcagacaagtctcgctctgtcacccaggctggagtgcagtggcacaatctcggctcactgcagcctcctcctcccaggttcaagcgattctcctgcctcagcctcccaagtagctgggattagaggctcctgtcaccatgcctggctaatttttatatttttagtagagacgggattttcaccatgttggccagcctggtctcgaactcctggcctcgaactcctggcctcaggtgatctgcctgcctcggtctcccaaagtgctgggatgagccattgaatgagccacaggcatgagccactgcacctggcctcttttttcattttaaatatccattaaatttactcatgattgtgtggtattctagttccgtaaataaacaataattttttaatccattcttatgttgatggaaatgtggattgtttccagtctttggctattatgaaaaatattgctatgaacattcttgtacctgttttttggcgagtttatgtaattctattgggtatacacctgggagtagaattgctgggccatagagtatgcatatgttcattttattaaatgttctgaaacatttttctaaagtagttgttctgttttatacacccacaagaaatgtctgggaattttatttgccccacgtccttgctaacacttgctgttgtctgttcttttcactgtggccatatagttagtgggtatgctattacattgtggttttaattttcatttcctgatgactaatgaggttgagcacatttttatatgcttatttgtcatttgaatgtccttattcatgaagagcttgtcaaggttttttcccatttttctgttggattgtctgccttttttctaatctgcctttaaaacagtaattttccccaacatgataatgtagtcatgatttttgtaacaattttttcaggtacaagtgcattttttttttttttttgagattgtgtttcgctctgttgcccaggctggagtgtagtggcgcgatctcagctcactgcaacctctgcctcccaggctcaagccatcctctcacctcagcctcccgagtagctgggaccacaggcatgtgccaccacacccagctcatttttgtatgttttgtagagatggtgcggggggtctcactttcctgcctaggctcgtctcgaactcccgatctcaagcgatctgcccacattggcctcctaaagtgctgggattacaggtgagagctacagcacccagcctacaacttctttattatttctttcttttttcagaaaaatgtattggagacgtaggagatgatgaaatcacatctaggattaacatcctagaaggagcctcggagagctgtgaataccctaataataaattatttcgcagggcatatcctgtgtctttagctttggattgtgtttctacctctaatgagaacaaaatagagaaggaggagccaggcatacagccgaatttgatctcacataccaagaagaggaaactgaggcctggagagataaggccacccacccttaccagacccttttaccaaggtatccaaaaacagcagcagagactaaaaacacactttactggaacccaaagaggttttctctaagtcaagctaacccagcctcaatcaatagagccagtgagaaaacattgattgtcaaaactctgctcttccttcagggtccatctcagatgcggtctctttcatgaaacatttctgatctttccagccagcgtcaatcttttcctattatttctgtcctggattgggttgtagcatttacctcattctctcttggactatttgtacacatgtcttgtctcctgagatatgtggtaaactcctgggaagacaggcttggcttgtttctttttgttggcgatggtgggagggaggcttatataaattagttgctcagtaaaagaccaaattgagttgtgttgcttctaaggagaaaaggcctgaggaactccgtgtttcctgaagcaactgacaggcatattcatattgaatttacaaatgtctttgttttacggtagtatacatttgacaatgagatcatgggccccagagtctctgtagataaagagaccctgggttgtactttcttggtaggatgcccaaggatgtgacggctgctctccctgccacacccagagttggtggctaacccttttcctgcttctgtgtcacttcgtggttccatggtagactcaagagctactctggggcagtcttggaactcttaagttaagctagggtagaggaatgaagaggaacggaaagaggaagagtgccatggcatgggaaggctaaggtctcctgtctccttcttccttcctgcttcttgcccagggggcccaggcccccagctggcagccacagcagcatgacagtaccagcaagggcgtgtgcacgcatctttcctcagcttcccttgcagttggtctgtcctgtcctgccctctcctccaccactcaccctccctgcacgcaaggtgactgcagagtggcaaggcacagggtgtgggcaaaacgtgtcctgtcaccacttgggcagggctcagccttggaaaacacagaggtacttgaagtccccggggctgtcatacaccaagatccggtagttgtacattatatgccctttaagggagcagtcctgacctcaggaagaatttctttggacttgggaatatgaataaaataaaatcttttctggccaagcgcggtggctcacacctgtaatcccagcactttgggaggccaaggcgggcggatcacctgaggtcaggagatcgagaccatcctggctaacatggtgaaaccctgtctctactaaaaatacaaaaaaattagctgggcgtggtggcacgtgcctgtagtcccagctactcaggaaggtgaggcaagagaatcgcttaaacctgggaggcggaggttgcagtgagccaagattgcaccactgcactccagcctgggtgacagaataagactccatctcaaaaaaaaaaaaaaaaaaaaaatcttctcagcagcctgttaagtggtctccatgatggactgagaaggcctggggtggaacaagaattaaaagaaattaaagactgtgtaagccaaaactcagttgtatgtaagaaaatccaattccccctgaggaagagaaagggctggagttctttaaaattaactgcctgtttttctctcggtggctagtgagccttatctttccctttcccaggcattgtgaagactctgtttctctagctgtgcagctgcaaggtcactagacagataatctcaagtcataaaacacattgttccttggaaagtaagaaataatgtaatgcacgtcttaattgaataactgtctttgtttcttgcttctgtaatacacttccacctgcacagatctctctccgccccatgaaattcttaaaaggtagcttgactctttgttcggggctcagtccttgggatgttaatttgacggggtcggtgcacctaaataattaaataattcctcctcaacccctcagtctctctgattccttaattatcccacagcaagggaagagctatggaagagcgatgtccttcctgattcctgacccttagagggagaggaggttaacagggaaggagaaaggggaaaaggcctacagacgcctaaatatatataattttaactccttatgaccatattgtcaagtttttttatgtataattttttttaatagagatggggtctcactatgttgctcaggctggtctcaaactcctgagctaaagcagtcctcccgtctcagcctcccagagtgctgggattacaggtgtgagccactgtgtacctggcccacattgtcgaattaatggaaaggaaatacagaaccagaaaaaccaagtaactggttagaagcaaaacttgaactagaacccagatcataaaatctaggaactgcaagggaaacggggataaggcaaagcatgttattgatcacttatgcatgtcagacactgcagggtttgtgtgtatgcttcctcatttcctctgtgtaattatcttattaaatcaatatcatatcattttacaggtttggtctgttttttttttttttaaaggaagtgccaaccattttgcctggcacagtacttggccctgggggtacaatgaagatcaagttcaagatcaaggtggtccctgccctatggtgcttttatgggggagagtcaggtaaggaagcagttatcaagccttctgtgtttataatagaagttcagaatgctttgggagcactgcggtgggtcctgcctcaggctgggaaaagtcagggagggcttcctgaagaagctttcaggtcttggagtgagcagagaatgggattgaggatagaggtgggtgggtagggaagacgagaaatgaggccagaggggtaggcaggttccagactccagaccacctggttagatgtttgcatttcacctaagatggagattcaaggtggagggtgttggaaggttttaagtgatgggatgataggatgagatgtccttattcttttttgtttttatttttctttatgatgatgattattattttttgagatggagtttcactgttgtcacccaggctggagtgcaacggcacgatcttggctcattgcaacctctgcctcccaggttcaagtgattctcctgctgcagcctcccaagtagctgggattacaggtgcattctaccgtgcctggctaatttttgtatttttagtagagacggggtttcaccatgttggccaggctggtctcaaactcctgacctcaggcgatccacccgccttggcttcccaaagtgctgagattacaggcatgagccaccgcgcccggcccttttttatttttactttttaaagacagggtctctctgttgcgcaggctggagtgcagggtgtgatcacggctcactacagcctcaacctcctgggctcaattgatcctctgtcctcagcctcctgagtaggtaggactgcaggcatgcatcaccatggctaattttttattttttatttacatagagatgggtctccatatattgcccagtttggtctcaaactcctagcctcaagtgatcttacgcctcagcctcccaaaatgctcagattgcaggcgtgaaccaccatgcccagccagatgtcccatttctaagggaaactttggttttggtgtggagggcgggctggagagggtaggactagaggatggagatgagctgggaacagcagtgattcacagtagtgagaatagcagctaagctaggacaatgtcgggagaaacagagagaaatggatgcactgaagaaattgatttaggagttagaaaccatcaggacttggtgactgatggctctgaggggtggggagttagagggatccaggatgactcccaggttttgtcttgggctgcgtcatcatcatggtgccaccatctactcagttgtccagatgagataactgaagctcacagaagtaatttatcccaggtcaatcaactcgtaaatggtagagctggggctcaacaccagccctgattgatgccttcctaattccaccagttccagcatttttctgtttataacagtctggacaacagccatgaacagctttggccaaggtgcacaactgtgctttctggagccatgggcttctgcagtggtgaatggagatttattctgagctttagtagttcatttgaaagcaatgttcggaatctcccctacctaatgccctaaagctctgcactatcccaaaaggcggtctgggttaatgaagggagagctcacctcctaacccagggttaggagacctgggttcaagtcctggtcctgccaagtcacataccttctctgggccccagtttcccaatccttgagtgaagaggttgggtcagatgacctctaacggccatttcagcatctgtttctaagatctacgtgtctggggagcaggaaacgtgcttaaatacgttacaggctagaggcattctgaaggccatttggtttgatttctcagtgatatgttagcctcctctaaagtgggcccagctgtggcctatgtaacttgggtcaggcacgggccccataacacactgatcaaatcagaattcttggatcagggctgcagagaagtctcttggaatgtgcaccagtgatcccagtgtgtagtgaggtttgagaaccactgtcttggaggatgctgggagatcgccaaggtgtgtgttacccacaggaagccagtgagagtgactgggggcctctgtggaggagaaatcagcccagggaagagccagatattccagagcagggagggaagcacacagtcagctgagaactaatcctgactcagtctctacaatgtgttcctggtgccacaggaaaacagtaggtggggaaagaagcaagaggtcttgccttttccgtctgcgagcccgtctccttcagtcccttcaaagcacctcccatctcttggctcctcaccaggtgagcagtgctgtgctcacctggcccagggggtgaagtgccttgctgcaagttgtgggagagaagacagcagaaaataactctgggttcttctgagcaaggcgagagtacatctggtcaggagataagggaggggccgggagcgatgcctcacacctgtaatcccagcactctgagaggccgaggcgggaggaccttttgacccacaagttcaagactggcttgggcaacacagcaagaccccatctccacaaaaataataaaaaaattatccagacacggtggtgagcacctatagtcccagctactcaggaagctgaggtaggggattgcttgagcccaggaattggaggttgtggtgaactatgatcagggcattgcattgcagcccggcagcagagcgagacccttgtctctaaaaacaaacaaacaaacaaacaaacaaacaagagatgggggaagactctgtgaaagccatacttcgtgagatagagccctctcctctttttatttatttatcttttttttttgagacagggtctcactctgtcacccaggccggcatgcagtgatgcaatctcagctcactgcaacctccatatctcaggctcaagcaatcctcctgcctcagccccctgggtagctgggagtacaggcacatgctgccttgaccagctaaattgttttgtatttttagtagagctttgtcatgttgccagggctagtctcgaactcctgggctgaaacaatctgtctgcctcagcctcccaaagtactaggattacaagcattagccaccacgcccggccttacagccttctgctcctaacaataccttcaaggccatcagtatctgtcaacaagcacttactgcatgcccaccctgtgccagaaaccacaccccgccacaggatgccaacaggaaagacgcagactttgccctttagcctccagaccagaggaggcggcagatgagcaaacatgccatcacagtgtcgtgtgagaggctctgggagcccagacggtcctgaaaactgaggctgggcactccaggaaggcttcctgggggaggtagcactgagttatgaaggacaggtttgaattacccaggaagaaaggggtgtgtggatgtgaaaggagggaggtggcgatgtcattacactgttttatatggtccaacacccttatccatccattatttcatctggtgttactatgatgctggctagaaagttcatagattattttcattcaatggactgagtgtcaaggggctaggatggaaaacttcctcatcattacagcaagagaatcagaggccctcatttgacaagcacagtggttattgaaggaatcttctctatggctgatatctctatctgtgatctctctcagtctcccagaaacttgggaaatagaaggaactttctccattttataaaagaggaagccaaggtttagagagatggacttcatcgacacccatgcacttgatggctagcaaggactcagcattttagaatactttccggattaaagtgaaaagtggattaataaatagtgctcccaaagtagggctttctttagtcacatctgcctgctatatacagacttaagggaggggttgttattattacgtacctcgttcactccctacttaatcccagcttcactatcacaacccaggaatattaaagacaattagatggttttagtttggcaatggataattataatcatgtcattttagcaagcttctcctgtgaccacttgaccctatttttttgttttttgagacagggtcttgctctgttgtccaggctgcagtgcagtggcactctcacagctcactgcagcctcgacctcttaggcttaagagatccttccacctcagccttccaaggagccgggactacagatgcatgccaccatacttggctaatttttgtatttttttggagagacgaggttttgccatgtttcccaggctggtcttgaactcctgagctcaagctctctgcctctctcagcctcccaaagtgctgggattagaggggtgagccactgtgctcagcctgaccactgaactctaacttggaagacatcacagtgtatccaatcacgtccaggcttaagcataaggccagcctgactttttcagtgggattttgagcagcgacttagagaggtgggaagtgagctttgccggagccccctaggctttccaggcagtgctggtggattctagcagatacagtagctcccaggtagacgagcacatgtgctcaaggtaatttattttcagtaatcagagtagactgtggagacttgtgaaggatctgtcctaattcagaatattggtctgtgaattggcttttagaaaaatcaactacttttagaagtttccttgtaactaaaatagaggttgctctagtatgaggagaaaaatcctggctgcaaatttgagatgaaagggaaaatcaccatccgagttctggagttgccaggatttcctaaggacctatgttatttcctttctctttgaaggccttgcattgctttgtttgtttgtttgtttgtttgttttgagacaggttctcactctgtcacccaggccagagtgcagaggtgcaatccaggctcacagcagccttgacttcccaggctcaagtgatcttctcgcttcagcctccaaagtagctgggtgcgcaacaccacgcccagttaattttgtattttttgtagagacacggtttcaccacgttaccctggctggtttcaaactcctgagctcaagcgatgggcctgccttggcctcccaaagtgctgggattacaggtgtgagccaccgctccccatcaggccttgtctttggtttctaaacctaccttgtacatttggtttttaacaaatgacaacaaagttccctgaaccataatcaaatgcacatgaacgcattggcctgtgcgcattcttcccacccagatcctgtgctcagctgatctttggagggcccacgccctctcagggactggggaggccctgggaaggtcaaggccaggcccttgccctggagcagcatagcctagtggcaaactcctgcacagcaccagcaggctgtgaagtaaagagagcagccaaaggcgcaacaggagagggagtccaggaaaccttagagggtaccatctttgagcctggagttcaacagccagaggaggtagcgatggtctgatagtccatgattctgcagtgctctgtacagagagccacaaacgtctttcctgtccttagacaaaataactattgttcaactagcccgtgatctttaactacagtgcaataaaattagaaatggcaaaatagttaaaaataagccatggcagtcaggcacaatggctcacaactgtaatcccagcactttgggaggctgaggcaggagaatttacttgaatccaggatgcggaggttgcagtgagctgaagttgcgccactggactccagcctgggtgatagagtgagactttgtctcaacaacaatgacaacaaaaaacatagaaaagtatcttcaagatattcaatttgcaaggccgggcacagtggcacatgcctgtaatctcagctttgtgggaggccaaggtgggtggatcacctgaggtcaggagtttgagaccagcctcaccaacatattgaaaccccatctctactaaaaatacaaaaaaaatagctgggcatcatggtggggacctgtaatcccagttactcgggaggctgaggcaggtgaattgcttgaacctgggaggcagaggtagcaaaaggaatgcagaatagtattaattatttttaaattaagtattattatttttaattattaaaaattattataaactattatcatagtgtaatattatatttatgttatataaattatatagacatatataaacataacattacttatataataatataaaatattattagtaattgttatttattaattattttaaaaattaagtattttttagacacattttagacacaaagatttgtgattaataattaatttaaaaaataattagggggcattccaagatggccaaataggaacagctccggtctgcagctcccaacgtgatcaacactgaagatgggtgatttctgcatttccaactgaggtacctggttcaactcactgggactggttagacagtgggtgtagcccacggagggtgagctgaagcagggcagggcgtcacttcacctgggaagcacaaggggttgggggatttccctttcctagccaagggaagccgtgacagactacctggaaaaacaggacactccccacccaaatcctgcgcttttcccaaggtcttagcaactggcagacaaggtgattctctattgtgcctggcttagtgggccccatgcccacggagccttgcttactgctagcgcagcagtctgagatcgatctgcgaggcggcagcctggctgggggaggggcgtctgccattgctgaggcttgagtaggtaaacagagcggccaggaagcttgaactgggtggagcccaccacagctcaacaaggcctactgcctctgtactccacctctgtgggcagggcatagctgaacaaaaggcagcagacaacttctgcagacttaaacgtcctatctgacagctctgaagagagcagtggttttcccagcatggcatttgagctctgagaatggacagactacctcctcaagtgggtccctgacccccgtgtagcctaactgggagacacctcccagtagcagccgacagacacctcatataagtggctgcccctctgggatgaagcttccagaggaaggatcaggcagcaatatttgctgttctgcaatatttgctgttctgcaatatttgctgttctgcagcctctgctggtgataccaggggaacaggctctggagtggaactccagcaaactccaacagacctgcagctgagggacctgactgttagaaggaaaactaacaaacagaaaggaatagcatcaacatcaacaaaaaggtcatctacaacaaaaccccatttgtaggtcaccaacatcaaagaccaaaggtagataaaaccacaaagatggggagaaaccagagcagaaaagctgaaaattctaaaaaccagagtgcctcttctcctccaaaggatcacagctcctcgccagcaatggaacaaagctggatgaagaatgactttgacgagttgacagaagtaggcttcagaaggtcggtaataacaaacttctccgagctaaaggaggatgttcgaacccattgcaaggaagctaaaaaccttgaaaaaagattagatgaatgactaactagaataaatagtgtagagaagaccttaaatgacctgatggagctgaaaaccgtggtatgacaactacatgcacaagcttcaatagctgattcgatcaagtggaagaaagtgtatcagtgattaaagatcaaattaatgaaataaagcgagaagacaaggttagagaaaaaagagtaaaaagaaacgaacaaagcctccaagaaatatgagactatgtgaaaagaccaaatctacatctgattggtgtacctgacagtgatggggagaatagaaccaagttagaaaacactcttcaggatattatccagaacttccccaacctagcaaggcaggccaacattcaaattcaggaaatgcagagaacaccacaaagatactccttgagaagagcaactccaagacacataatcgtcagattcaccaaggttgaaatgaaggaaaaagtgttaagggcagccagagagaaaggtcgaactacccacaaagggaagcccatcagtctaacagctgatctctcggcagaaaccctacaagctagaagggagtgggggccaatattcaacattctttaagaaaataattttcaaccccaaatttcatatccagccaaactaagcttcataagtaaaggagaaataaaatcctttacagacaagcaaatgctgagtgattttgttgccaccaggcctacctgacaagagctcctgaaggaagcacgaaacatggaaagaaacaaccggtaccagccactgcaaaaacatgccaaattataaagaccatcaatgctatgaagaaactacatcaattaacaggcaaaataaccagcgaacatcataatgacaggatcaaattcacacatagcaatactaaccttaaatgtaaatgggctaaatgccccaattaaaagacacagactggcaaattggataaagagtcaagacctatcaatgtgctgtattcaggagacccatctcacatgcaaagacgcatataggctcataataaagggatggaggaagatctaccaagcaaatggaatgcaaaaaaaaaaaaaaaaaaaagcaagagttgcaatcctggtctctgataaaacagactttaaaccaacaaagatcaaaagagacaaagaaggccattacataatgttaaagggatcaattcaacaagaagagctaactgtcctaaatatatgggcacccaatacaggagcacccagattcataaagcaagtccttagagacatagaaagagacttagactcccacacaataataatgggagattttaacaccctactgtcaatatcagacagatcaatgagacagaaggttaacaaggatatccaggccctgaacttagctctgcaacaagcagacataatagacatctacagaattcgccacccccaagcaacagaatatgcattcttctcagcaccacatcgcacttattctaaaattgaccacataattggaagtaaagcactcctcagcaaatgtaaaagaacagaaatgacaacaaactgtctctcagaccacggtgcaatcaaattagaactcaggatcaagaaactcactcaaaaccgaacaactacatggaaactgaacaacttgctcttgaatgactattgggtaaataacgaaatgaaggcagaaataaaggtgttctttgaaaccaatgagaacaaacacacaatgtaccagcatctctgggacacatgtaaagcagggtgtagagggaaatttatagcactaaatgcccacaagagaaagcaggaaagatctaaaattgacaacctaacatcacaattaaaagaactagagaagcaagagcaaacaaattcaaaagttagcagaaggcaagaaataactaaaatcagagcagaactgaaagagatagagacataaaaaacccttcaaaacatcaatgaatccaggagctggttttttgaaaagatcaacaaagttgatagactgctagcaagactaataaaatgaaaagagagaagaatcaaatagacacaataaaaactgataaaggggatatcaccaccgatcccacagaaatacaaactaccatcagagaataatataagcacctctatgcaaataaactagaaaatctagaagaaattcctggacacatacactctcccaagactaaaccaggaagaagttgaatccctgaatagaccaataacaggctctgaaactgaagcaataattaatagcctaccaaccaaaaaaagtccaggaccagatggattcacagccgaattctaccagaggtacaaagaggagctggttccattccttctgaaactattccaatcaatagaaaaagagggaattctctctaactcattttatgaggccaatatcatcctgataccaaagcctggaagagacacacaaaaaaagaggattatagaccaatatccctgacgaaaatccatgcaaaaatcctcaataaaatactggcaaaccaaatccagcagcacatcaaaaagcttatccaccacgatcaagttggcttcagccctgggatgcaaggctggttcaacatatgcaaatcaataaaagtaatccatcacaaaaacagaaccaatggcaaaaaccacgattatctcaatagattcaggaaaggcctttgacaaaattcaacagtgcttcatgctaaaaactctcaataaactaggtattgatggaacatatctcaaaataataacagctatttatgacaaacccccagccaatatcatactgaatgggcaaaaactggaagcattccctttgaaaaccagtacaagacaaggatgccctctctcaccactcctattcaacatagtgttggaagttctagccagggcaatcaggcaagagaaagaaataaaaggtattcaattacgaaatgaggaagtcaagttgtccctgtttgcagatgacatgattgtatatctagaaaaccccatcgtctcagcccaaaatctccttaagctgataaacaacttcagcaaagtctcaggatacaaaatcaatgcgcaaaaatcacaagcattcctatacaccattaacagacaaacagagagccaaatcatgagtgaactcccattcacaattgctgcaaagagaataaaatacccaggaattcaactaacaagggatgtgaaggacctcttcaaggagaactacaaaccactgctcaatgaaataaaagaatttacacaaacaaatggaagaacattccgtgctcatggataggaagaatcaatatcgtgaaaatggccatactgcccaaagtaatttatagattaaatgccatccccatcaagctaccagtgactttcttcacaggactgataaaaactactttaaagttcatatggaaccaaaaaagagcccacattgccaagacaatcctaagcaaaaagaacaaatctggaggcatcatgctacctgacttcaaactatactaaaaggctgcactaaccaaaacagcatggtactggtaccaaaacagatatatagaccaatggaacagaacagaggcctcagaaataatgccacacatctacaaccacctaatctttgacaaacctgacaaaaacaagaaatggggaaaggattccctgtttaataaatgatgctgggaaaactggctagccatatgtagaaagctgaaactggatccctttcttacaccttgaaaaattaattcaagatggattaaagacttaaattttagacgtaaaaccacaaaaaccctagaagaaaacctaggcaataccattcaagacataggcatgggcaaggacttcatgactaaaaacaccaaaaccaatggcaacaaaagccaaaatagacaaatgggatccaatcaaactaaagagcttctgcatggcaaaagaaactaccatcagagtgaacaggcaacctacaaaatgggagaacatttttgcaatctacctatcggacaaagggctaatatccagaatcctcaaagaactcaaaaaaatttacaagaaacaaacaacctcatcaaaaagtgggcaaaggatatgaacagacacttctcaaaagaagacatctatgcagccaacagacatatgaaaaaatgctcatcatcactggtcatcagagaaatgcaaatcaaaaccacaatgagatactatctcatgccagttagaatggcaatcattaaaaagtcaggaaacaacagatgctggagaggatgtggagaaataggaacgcttttacactattggtgggagtgtaaattggttcaaccattgtggaagacagcgtggggattcctcaaggatctagaactagaattacgatttgacccagcaatcccagtactgggtatatacccaaaggattataaatcatgctactataaagacacatgcacacgtatgtttattgcggcactattcacaatagcaaagacttggaaccaacccaaatgtccatcaatgatagattggattaagaaaatgtggcacatatacaccatggaatactatgcagccataaaaaaggatgagttcatgtcctttgcagggacatggatgaagctggaaaccatcattctcagcaaactatcacaaggacagaaaaccaaacaccgcatgttctcacttataggtgggaattgaacaatgagaacatttggacacagggtggggaacatcacacactgggacctgttggggggtgggggactaggggagggatagcattaggagaaatacctaatgtaaatgaggagttgatgggtgcagcaaaccaacatggcacatgtatacctatgtatcaaacctgcatgttgagctcatgtaccctagaacttaaagtataataaaaaaaatttaaatttaaatttaaaaaaagaaagaaagaaaagaaaagaaaaagaaaagaaaaatattatctgggatttgtttcaaaataatttgagagaagggaataaacggaggaggcattggtggttgggttggtagttgctggggctaaatgatggtgttcatgggattggttacactattctatttttgtggatgttcacaaatctccataatagaaaagtttttaaaatatatgctacacagatataccatttctcatctatttggcaaaaattcaaaagcttaacaacacactatactgatgaggctgtaagaaaatagaaactcttacattgctggcaagaatgcgaaatggtaaaaccctattgggtgaatctggtattatttaacaaaatcatatatgcttttatcctatgatccagcattcctatttggtactgtaatgtgaaacattttaggtatgataagacttccggaccattataatgtacattataggataatgtaaatatgttgatatgattaattatatttaaaataaaagaaaacatttatttgttattaggaaccaagactttcatagtgagagaaaacaggtacaaacaaaaaacagaagaacaaactgtgtacaatacgtctgaattagaaatactatgaactaaataattcctgaagatatgatagtaatagaaaatgactactttgtaatcccaatgtctcactgatttacacaagcatcttcaatggacactaaaaccactagatgatatgctgttaggaaacagaatattcatagtctcaaaatatcaccccacagttttgttactaattacaaacaataaatgtatctttacattggagagatcttatagcccccacctttaccaaataacttggtatctattgaatctagaagctaggtgctaatggataccacctctctctaaacaaaccaagtatggtatgattccactgacaagaaatatccagaatgggcgaatccataaagatagaaggtagattactagttgcctaggtacagggaaatgagttgttgtctaagaatgggagggtaaagggtttctttgggggagacacaaatattctaaaattgattgtggtggtgtccacataactgtgaacacactaaatcacacattttaaataagtgaattatatggtgtgatacctcaatacagcttttttaaaaaaagaaaaaaattattaataaataatgttgccatttgtgtctaaaaaataggtatacacttgaaaatgaataaaatagcccataaaattatacttcagaagctggtaacagtggttgcctctatggagagaatcaaggtgcctggggcgcaggagaggggagggagacttacttttttaaattaaggtataatttacatacactgctattcgccccttttagtatacatttcccccagttttgacaaatgcgtgcagccatgggggcacacagcaatgtacatatagactgcttccgtcacccctaattttctcctgtccctctatagtcaagccgtggcaccaccctcagcccccgacagcactgatctgttttctgtccctacagttttgccttttccattatgtcacatgcgtgggctcaaacagatgtagcttctgagagacttttttctgcattttttatttcttgaattttgttttatgtgtacatattatctattcaaaaaataggtaacagttttggacagcaaaaatcatccttataaataatccatgggctagagagaaaacccagtggaaatcataaaatatttagaactgaatgataatgaaggtattcatgaaatatcattaatgaaataggttttgatactattatacgtactggaaatatcaaaacccatggatgcagcaaaaataatatctggggtaaaatttataaccttaagtatgttgatcagaaaacaaacactgccaggcacggtggctcatgcctgtaatcccagcactttgggaggccgagacaagcagatcacctgaggtcaggagtttgggacctgcctggctaacatggcaaaaccccgtctctaccaaacatgcaaaaaattaaccgtcagtggtggcacgtgcctgtaatcccagctacttgggaggctgaggcaggagaatcgcttgaacccaggagacagaggttgcggtgagccaacatcgcaccattgcactccagcctcggctacaagagtgaaactccgtctcaaaaataaaagaaaaaaaaatagaaaacaaacattgtattttaaaagatgctaatgtgtcctaaaaagccaaacaaagcagaataaatgcaaagatctagaaggatattattatgaaataattaataacaacaagaataaatggagataataaaaatacatgtgatttgtatattgatgcacaaaagcaacttagggtggtggaatggacattggacttaacacatttatgccggaggtcacaaatttttttgtgtgaaaaatcagaccttggcgatgaccttgagcagtaggatacaaataactcccacaagcttagcgttccaatagtagaacactaggcatcaataacttaagacctctgagactcagtttcttcacctcccaaatggggataaaacctcctttttcccagtggtaggtaggacttacaccaataaggatttagccgaccaggcgtggtggctcactcctgtaatctcagcactttaggaggccgaggcaggtggatcacctgaggtcaggagttcgagaccagcctggccaacatgatgaaaccccatctctagtaaaaatacaaaaaattagccaggcgtggtggcgggcgcctgtaatcccagctacttgggaagctgaggcaggagaatcgctcgaaactggaggtggaggttgcagtgagctgagatcacaccattgcactccagcctgggcaacaggagcaaaactctgtcaaaaaaaaagaaaaggatttagccatggtagagcccttccctctctgtgccccagcatagaaggtaattacagtggggattatggtgtgccagtagagaagtttctctttaaggtttaagacatgtgttcccttacctgagtttctttcttctctactacttcttgaatctttcctttcttccttcactgttgatctacactagagaggttctgcagaagaacaacctgaggtcactgagctctaggtcaggccagtcagagttcacacaccggattcggaaacaccttgaaataagagctaagtccttgtattagaagaccaagacttaaaaccagatctatcccttttaagctgtgtgatcatgaacaagcctcttaacctctttgcgtctttgagtttagtgtcttatctgtcaaacaggatcacagtaatgcccatatcacagagttgccatgagaatcaaatgaggaagccgggcatggtggctcatgcctggaatcccagctctttgggaggccaaggcaggcagatcactttgagctcaggagttcaagaccagcctggccaacatggcaaaatcctgtctctacaaaaaatacaaaaaatagccggatgttggtggctcatgcctgtagtcccaggctgaagaaccacttaagcccagtaggaagaggttgcagtgagccgagatcaggccgcactctagcctgggtgacagagtaagactctgtctcaaaaaaaaaagaaaaaagtggtgacatatgggaaagtatttttctacattgtaaagtgctatataaacgttagctattacagtaattagttttattaaaacttgtccaccaaaagtatactgaaaaacacttcccctgttcacacgggaggtctgtgcctgtggcagctgggatgggggtggtggctattctgattaggcatcccacctcctgggctggccagccagctgccagcccactaccaatacctcagcgagtgtcccagcttttcagttacacaattaaggagggtccagtggaaactttagggaaaggataagggtaaagagaaatgtttcttttgtgttgaaaacaaaattattacccttacctgtgtttcctgggttcttggctagcctgaagaagtaattgttattgaaaggttaacaattcagtatgtaattctttttccaaaacttttatagactagattacagtgctttccaagagaaggagaatgcaaaccataaatgaaagctgtaaatggaatttaaaatgttccagtagccctttttaaaaagtaaaaaggaacaggaacaattagttttcatgatattattagattttatataagccagttaatctaaactattgccattttaacatgtcatcaatataaaagttataatgagataatttagtttttttcacagtaagccttcagaatttgagattgacttacagctcattctaatttgaatcagctgcatctcaagtgtttcacggccacacgtggcatgtggcaattttattggacagtccaggactaggactttgtaaggcttagggaaagccacttcatccctgaagaggagaaaacgcggctggaatctgagtggcttcttgtaaaggatagtcaggggagaaaagtgagttccagatttgggttcatacagtcattcgttcatcaattatttcttgggcaccaactttgtgccaagtgctgtggtcttggctctgcagccagctcatttcatgactttgcacaagtcacttcccttctcagaaccccaaactccctgttccaccttggagaaaatgaggttacctgtctatgaaggagagaaatgtttgtaccagctagaggaaaatgcctctagaaatcattaacagtggagttctgaaaggccggcagcaccaactggtttcattgattccatggatgaagctctcacgatcccattattattattattattattttattttgagatagggcctcactctgttgcccaggctggagtgcagtggcatgattatagctcactgtaacctcaaactcctggactcaaactcagtctcctaagtagctgaggttataggcacgtgccaccacgcttagctaattaaaaaaaaaaaatttgtagagacggggtcttgctatgttgcccaggctggtttcaaactcctgggctcaagcgatcctcccatcttggtctcccaaagtgctgagattacaggtgtgagccactggacccagccccctttattattaatgtcaaaaccaaccgactctgtaggattttagtggaggaattaatcacacaagtcttatccatggaaacagtgatttatcatgctcatggcatcacctgggacctgatttcttcaccagtgtcttattgaccatctttctaaaggagggtctaagggagaactgatgaaataagtcataaattccaagtgtgttatacatgctaagttatcattcctgtctgtcagtagatttaactgtggggagatatccaggaggttttgcaaggaggggtgctagggcttagtactctcattatatctcagtacagatggaaataaagttacatctgtaaacctgtaggtggccatgactttggaatgattgtagcttaaataggaaaagtaaatagagttacccttcctaggaattgggcaatatttgccatacagctgggctgtcaggtaaaatcagttttcaacttctgtgcctggaaaatgattctacataggtatttagaagcgttgtacatagatatccagaagtgttagaaactctttaaatagataacaatcataaaatcagataccatcacttgtggttgtagcccaagccgatgttagtaatctggatgcatggggacatgcagatatgacaatcgctaatgcaagttcaggtggtaagcactgaacaaacccctgacattggtacatggtcttttcattctataatgtgttttcacaacattgtctcattgaagctttacaacagctttgcatagtgagtaggctataggttataatcctcattttacagagaaggagctggaggctcatcagttaagtaactaggtgaaagttatggcactaaagaattgtaaagatgtttgtatgagtgatgatttcttttttcaacagctttggggtacaaatggtttttgttacatggattaattttatagtggtgaagtctgagattttagtgcacctgtcgccggagtaatgttcattgtacctaatatgtcatttttttaaaccctctccactctcctttggagtcaccaaagtccattatgtcactctgtatgccattgcatcctcatagcttagctcccacttacacatgagaacatatggtatttggttttccattcctgagttacttcacttagagtagtggactccagctctattcaagttactgcaaaagacattatttcattcttttttatgactaagtagtattccgtggtgtatatgtaccaccttttctctatccactcattggctgatgaacacttaggttgattccatatctttgcaattgtgaattgtgctgcaataaacatacacgtgtaggtgtctttttgatataataacttcttttcctttaggtagatatccagtagtgggattgccagattgaatggtagatctactattagttctttaagaaatttctgtgattttttttcttttatttgtattttgtttttgtttgtcactccacatcttgctgccttcctaagcttccccactacagaaaaagggccctgatgccttatccaacttaggacatgtgtggagcttctttgtgtctagagaggtcctagtagttaagcagactttcagctgactgatgagaactcaagccgagaagaaggcaggcctccatggtctcacaaataagtagacttctcggtagggacaggacaggaggaagaaaaaatggctgttcttgtttatttccagtactatcagccacaaaaggagtgggatcattgctcagaaagacttccctactactggacacaatgggctttattagaagtggaaaaacattctagatcgcatcttataaataacaaccccttctcttcacattgcacttcataattcacaaagcttttttacagatataacttaatcaattcgtgcatgcatcaatttcataagttagagaactgtcttgcacgcagtgctttgtgcattgtaggaaatcaggtatttgttgaataaatgaatggctcaatctccattttgcagacgaaaaaacaaaggtccaaagaggctgagtgatttatcacagtgagggaagcgtgaccaaaacccgtattttctgagctcaagtctgattatgctcctatataagtttttggacaggcaccacagaatattactaggggaaatagtcacactttccctgagcagcttctcaataagtagggatttgggggtatctcaggtctcaccgatcatttatattgctgtaaattaaatcattattcactttctctagaagagatggaaaaacaccaaattagcattccacttcccaaacagcccggcagagtgaagatggcagtgaacagtagccaaatttctaattttctcatcaagaaatcaaagcagaaggattaatctgtgagccaccaatcacaaatataaaataatgccagcttggtaaagaaagtggaaaacattatatactgaaaaccccccaagcagcacctggtattgaaatcccagcctaggagccacatgtctcaacagagaagagagcttctttattcttcaggaatttcaagactgaaaagataaattagaatctcaagaaatggtttcaagggtgtttattactaaagcccctaaaataggaatgacagagtcagtggtgagggaaacgatgtgggttgatgaatccagaggtgtttggacgagtgtacaaatggtcttagaggaaggaaggcacttctggacaacctctgctgggaatggcaagcatcttcctattaggcattttccagggttcaagactcccattgaagaggagttttttttgagacagggtctagctctgtcacccaggctagagtgcagtggtgtgatctaggttcactgcaacttctgcctcccaggctcaagccatcctcccacctcagcctccccagtaaccaggaccacaggtatgtgccaccatgcctagctaatttttgcattttttgtagaaaaggggtctccttttttgcccaggctggtctcaaactcttgagctcaagcgatccgcctgccttggcttcccaaagtgctgggattgctggcattagccatcgcgccccaccaaagaggatcttaatgaaccatctaacataacactcctgactctggccagtctgccaattgtctccagaacatttccgtctctgtcattaagcctccatttgtccttctggggtagtagataaatcattatacttgaagtactatttccctttatccgagttctagaaggtgttgtccttaggtttagcccaaacctactcccaggtacttctatctgggagcccattccaaaccaagctaacccctcttcactgtcacatatttcatcaaccacaggagaccataaccatgatgctcccatttccggcagctacacatctccagccggagggtaatgacttaacacattcccaaaagaatggggtttccagatctgttatcatcatggccatccttttggccaagtttctggactgaaagctggactccagagatactctgaacggcagagggcacttcctctaggatggttacttaacacccacctctgccctcagaaaaatgcccactaagtaaggaggaagtgcaggatggaaggatggtctctgctttcagggacggatgcttgagaactgctagggcccatgtgctgggttgtcaaggcaacaggcagcaccatttcaacacctccgcattgtagctatggggcctggccctggtccatgctgcagctgtaggcccagcagtgggtgaggggccatgctctccagaatccctcagggcaggctgatgctccctccctgcagctctcagagcagccccatcaggcccactcttgccccagcaagtttttgtaatttacactctgccagcagcaaggcccacccatcctgggttttgagtctcctgaatgcaggttctataacctccagagagaaaatgtgcccagtaagtgtccaggggctaaaaggttgagatagcagagcacgggcgttgagaggagaggatgtgtggtgtcagcggtgctttggtctttgacttcaagctcctccctggagcatacacagaactttacagctaaaggaaacattccaaacccaacctccttcttcttgtaggtgaagagacaggcccagagaagagtactgacccacccaagggcacaatgtgatgtacacacagagtctacctatacaaggacccagtacccacctcctggaatctggggcagctagtgttgcttttctgagatctactgtgagggctcctaggaggagggcacaggatgtgggtgcttcccctcctccacctatttcccacgtatgggatgcaggctcacaaatgctacattttgacttcccgcttcggagagcttaagtgccactctgagcataaactgtgggttagcaagagatcaggcacacacaccggacatgaccacaaggccatgaaggcaagcccttccagcttcacttcccccacttgtaacatggtctgggttagctggtcactgagatctctttctgcacggacattctgcgatcattctgtggtcaggcacctcaggaatctctttagcctacactgcagagagatttcatccaatggtagcagaattaaaaaggaatctgtattcatgccaattgcttcttttactgtcacaagaggaagaagagttttgaggatgggactggtctcaaaatggccctcctgtttatgatggatgtgtgggtgagggggcagttatttcagatgctcaggaaacatgctggcacctcacaggagctgacatcctgtgacctgcacagtccccaaggaaggcttccctacccccttaagcctggttcaggtacagtcccacgtgcagccccagtcttaatgccaccaccacactcccaggtggtggcctctccactgtatcttgttatgatgtcttgtttacccccagacctggcacgtggtaggtatttactgcattctttaatgactgatgaaatgagcagagtctctctactgggacaggaaagcaggacaggagtgaggttgtggtgtgtttggaaatatggtgctttagcttgtcatatcacttgggcgggtctcctgcctccctttttatatgtaaaataaaggagtctgacagataagtgttttccgaactgttctgtaaaacactagtttcttggatattttgcagccaaaacaaacagtctccctgggtaactggggtgatgtgacacactgtaactccttcttggagattcatatgtgcatttgaatattaaaggctctgagaaggcctgcagtaaagacatctatctaatttcatttaggccaagtttctccaaaattctctggcctccctctccttatatctgaggaactggtgttccgaagcatacaacttgggaaatactgaactagacaatttctttctttctttctttctttctttctttctttctttctttctttctttctttctttctttctttctttctttcttttttctttttggagacagaatcttgctttgccactgaggctggagtgtagtggtaccatctcggctcattgcaacctctgcctcccaggttcaagagattatcctgcctcagcctctcaagtagctgggattacaggcatctgcccccatgcccggctaatttttgtatttttagtagagacacggtttcactgtgttggctaggctggtctcaaactcctgacctcaagtgatccgcccacctcggcctcccaaagtgctggaattacaggcatgagccaccacacctggcctttgaactaaataatttctaagtgcccttgtaactatgtttcatccatagaggaggtggcctggtatagtgaaaacagtgtggactttggaatcagtactgggcttaaatcttggctctgccttttagtagctgtgtggccttaagtaattgatttagatttccagagttggatttactaatctgtaagatgagcctaataatacctgtttgttatggttgtaggttgttgagagtattagatgaggtaacagatatgaaggatcaacagcagtgtttgacaaacagtaggcccataataagtattagttcctttgctctattacgtctaacgctctacttccaccccttacctctaccaccaaactcagagtggactgttggcaggcagagaatgcagcagggaggcagactgagtccaggtcctcacatggccctaatcgtgctctctcagtttcacggaaggaccacaccccagcctcctctttggtagggggaccaaaggtgaaggggccaagggggaggtggcagagaatccttccctcctttgccaagcgaatgtgtcttctctgtgtcttctctgtgctaggcaactagatggtgttagtaacaagagaagataaaaggatgctttcaaactttacagaatgaacgccctctctcataaatccactacctaaaatagcaagccccaacatgagggcaaagccttggcctgtctgcctgggcaggaaggtagcacaaaggtgggatctgacggatggtggagtgagaaggcagggttaggaacctgaaagggcaaggcttagaaaggcttctaggagccttggcaccagcagagccatggcggggggatctgcgctcagagcaaagccaccagttggcaaacacaaatcagtctccaagttcgcaccacacaggacttgtttgtggtggaggaagcaagacatctgccagggaggcaagaatggatgctggggcttggcttgttgcagggcctgaaccagtgggctggatcaaatgcattgaacctctgtggacgggtctcatttttgtattactcttttttttcccttccttccactttagggcaatattagaagaaagaatgcaggggcggggtgtggtggctcacgcctgtagtcccagcactttgggaagctgaggtgagtatatcacttgaggccaggagttcgagaccagcctggccaacatggtgaaaccctgtctctactaaaaatacaaaaaaattagctggggtggtggcgggcgccagtaatcccagctactccggaggctgaggcaggagaatcacttgaacctgggaggcagaggttgcagtgagccgagatcgcacctctgcaatctatcctgcgcaccagagtgagactctgtctaaaaaaaaattaaaaagaaaataaaaagaaagaatgcaggccttggagacaagagtggttttaagtcttactctgcctttgctagttttgtctccttgggcaagttacttaacccctctgaagcttagttttctcatgtgtaggatgaggaagataatttctactcagagagtagttgcagggaccgaatgagttattgctagtgaattccagagtgtggcacgtgtaacccagacacgggggcagacattttaaattctaatagtcaatgtttagtttcataggcattagaaaaataattgacaaaccaaatcattttatgaatgttattgattagtgcaagactaaagtagttaggtaagttaattaattaatgtatttatttattttgagacagagtttcgctctttcacccaggctggagtaaagtggggcaatcttggctcattgcaacctccattccctggattcaagcgattctcctgcctcagcctcccaagtagctgggattataggcacgcaccacctcgcctagctaatttttgtatttttagtaaagatggggttttgccatgttggcccagctagtctcgaactcctgaccccaggtgatccacccgcctcaacctcccaaagtgctaggattacaggtgtgagctaccgcgcccagctggtaagttaaagaaaaaagggaaagggagttaatttaaagaaaaactttaagttaattatgatgtagctggtgggcagatgtggcaaaactcaagaaggtgctgtgtgaatgactaaagtacaggaaactgaattaatacccactcaatcatggtggctggttcgtggcaggcactgaaggtcatttccaagaaagtaaagaggtttagaaaaggaagggagggaataagggaggaaacagaccttcttagttgtctacctacttagcctgtaggtccacttcagccatactcttcttccagaggttccctttttgttttttctttttaaaaatattttttaattttattttatttttctctactaggttagccaggcatgatgtcatgcacttgtagtcccagctacttgggagcctgaggtgggaggattgcttaagcccaggaggtgcagattccagtgagctgagatcataccactgcactccaacctgtgtgacagagccaggccctctcccaaaaaaaataaataaataaaaataaaataaaataaaataaaataaaataaaataaaataaaataaaataaaataaaataaaataaataaaataaaataaaataaaataaaataaaataaaataaaataaagggtatacggtgaagagtcagtctctttttttccttaacaattaggcccctaggttcctttcccagagaaaacaactgttaacatcttcttttaaatctttctttctaagtatatgcaagcataattgtgtaggagcctgtttttttcaaagctcttttgatgagaatttatatctagaatcctaagacttaaaagtgcaaggagggggatgcgtgaaacacactaagatcatcttgttcagagatctcagtgagaatcagaaaatgcgtggaggtggccacactcattgacaatctatgtctaatgaaagatgtttttgttttgttttgttttagagacagggtctcattctgttgcccaagctggagtacagtggcatgatcatagctcactgcagcctcaaactcctgggctcaagtgatgctcccacctaggcctcccaaagcattaggattacaggcatgagccacagcacctggcctgagaggtgtttctggtgagcacatatagaacatgagataatgtgaaggttgaagcaaaggctgagacctactgacttaggccaaaccatttcccaaggtctccaaatgagttagtgacagacccaagaatctagtctagctagactctaagttctcaggtatctaacttgctgccacagttttaccaagatgtaaacattcaggacagagactctgagccagaggaagtcctcccagccactttgctacagtgtagaaggtcaggagagaccaagtgtttggggcctgttgaaagtagagagtggctaggaacttatctggtctcatattgtaaggaacataaaggaataattccatttcctttcatgtttcctgtgtacaagtcctataaatattgccatatctctaagagcaaaccttgtttggactttccagacttttgctttccaaagaggtgaccagagacgtttcccagacatcctccacttcctgttgttgtccacactgtcttccagtagagagggtggtagcatcatttgaagtcacccttccagtttcaagttatttatttacttgttgtgaaggcccatgttatgctgggacaagccttgggcctctgaaatttatagctgtctttatggatgcatgaaacgaagatctaaatttactgcatgggaaattccaactttgtccttgagacttaaagagcctttagtgttggatccatctggtgaagaccaaaatttctaattaaatccagccaacagccaatacattctcaaactattaaataattcactaaagtcctctagtgctgaatccatttttatttacctaattcagtatgtaataagataaaatcagaatggaaaatgcatactttgcactttttcatagctgccttatttgaaaagatatggaagagcttggtagtaagcatgacagtaggtaggtgcggcaggaagtgaatcagggaggtggcgatatgtcaccaagccctttgtgtatgctgctccctggacatactcacattgctgcaggaatgccttttctctgatacaaatccctttccctccaatttcttttttagagatgaggtctcgctctatcgcctaggctggagtgcagtatcactatcatagcttagtgcagctttgaactcctggactcaagcaatcttcctccctcagcctcccgagaagctgagaccacaggcttatgcgaccaggcatggctaattttttttttttttttttaaaggagtctcactctgtcacagcccaggctgaagtgtagtggcatggcctcagctcactgcaacctccacctcccgggttcaagcatttctcttgcctcagcctcttgagtagctgaaattacaggtgtgtgccaccacacccggctgatttttgtattttcagtagagatggggtttcaccatgttggccaggttggtcttgaactcctgacgtcaagtgatccatgcaccttggcctcccaaagtgccaggattacaggtatgagccaccactcacactcacctgtctttttgcagagacagggtcttgctatgttgctcaggctgtctcgaactcctggcctcaagcaatcctcccaccttcgcctcccaaagtgttgggattataggcatgagccactgcacctggactcctccaatttttgtttattcatatctatcttttaaggcctgtcccaaatgtcgtctctttcatgaatcttttatcaattcaataggtaaacctactgagccttcttgcatattttagtcacatacattttgctttcatctcttcttttcggttgtcaactctttaaaggcaagaccatatttatcttattttatatctttatttttggcacaaatctggttttattaatagttgtttagaaaaagaaagagaaaacttacttttctttcttgttacataacttatgcatatttattataaaccactagaaaatacagcaaaacaaaatcaaggaatacaaaccatttgtattttgttgcacaacattctatgcttttaaaattcctacatttgccataaagatatatcaaaactggatcatactacaaataaactttttaaatctactttttatattacaacatattattaatgtttttctgtgttagtatcatgtttttaaaagggaaatatgttttttctctgattataaaaacatgtccccatcataaaaaaagagaagaaatgtagaattgcatacagaatcaaataaaaattatgtcttaatcacaccacatagaccactgttcatattctaataaatatgaactagatactttttcctgtggagcaggtgtgtgtgtgtatcacatcaatacatatttatttaaatatcttcatttatacatgcaatttcttgtacaaagatattgtgaacatctttcagtgtcaaataattaagatatctatatatttttaaagtatctgcatagattatgtgtggatctgtcacactttaataaattttttattattgattgcttacatttttctaaaatacttctttaaccaatgttatggatcatcctagtatatgcattggtaaatttacacttttcaggatttaatacaaattgctttccataaaatgtgttgttttaaatttccccaaatgtctaaagagagctttagcctataacgacataataaacatagagtagtaggatgaatggactccagaataaatagttttcctctccttctactcttttttttctttgagacatcagtggaaaatctgtttactcatcagttaccttgggagaggagccactagaggtatggcctgggtaaaccaactgcttttttgatgttttgttttactttttgttttttgtttttgagatggagtctcgccctttcacccaggctggagtacagtggtgcaatctccgctcactgcaagctctgcttcctgggttcaagccattctcctgtctcagcctccccagtagctgggactacaggcgcccgccaccacgcccagctaattttttttttttttttttgtatttttagtaaagatggggtttcaccgtgttagccaggatggtctccatctcctgaccttgtgatcttcccgcctcggcctcccaaagtgctgggattagaggcgtgacccaccacgcccagccagctaccatgctcagccttcagttctcttgtcactttagtaaactgagaaaatggctcgcacaggaagcaccttgttctgaatctaccagtgggtgagccgcagggcgtgggttagagagggatcctgaggccatcagactcccagctctgccttccccattcattcaccacactcccctgggtagcccttcaccctttcccaaacctttcgatttcttcataaattgcgtttatactcaagcggcttatactatttctgatggcaaaaacaaagccaagtacgatatgtacaagttgctgtaaagcatgcagcagacatgtggtttaatcatttccccccactaaaatttataattgttagtgtctaacatgaggtgaaggagaaggaacatgaaatttggaatccaaaagtttaaatttgagtctaagaacttgaaacccctagcatgccgtacaacaaaatacaaatggtttgtatgctatgattttgttttgctctattttctagtatctataatgaatatgcataaatgacataacaagaaggaaaagtaagctttctttttctttttccaaacaagtattaataaaataatacattgtctttaaagagctgacaacctatctgggcatatactttctccctgtaaaatggcaggtatattcatatctgcttcctgggagccttgtaaagatcagataaaacggtgagtataaagcaagctttgtacttattgtacaaatgcttaactatgttaacaacaacatttgctgttattgatcatgttgaaaaatatttccctaaccttgcatacctggccccataggactttctaagatgtgtttctcaaatgaaagaaaggaagtgactaaaatgacatagcagaaagaaccatacacagagagctggaaagcctgcattctcattccagatgatttggacattagtgttttcatgggtaaaaggaggaagttggacaaaatgactcctacactctcttccggctctgggatccgggtcagttattctgtgaacttgggcaaattttttatttgtagacctgggtttcctcattagtcaaatgaagaggttgggttggatgacttctctggtccatttcctttctgagaatttacacaatcccagtgacctgcccattgtcattgctgttctcttttttttttttttttttgacacagagtctcgctctgtcgcccaggctggagtgcagtgatgcgatctcggctcactgcaacctccatctcctgggttcaagcgattctcatgcctcagcctcccgagtagctgagattacaggcatgcgccaccatgcacgactaatttttgtactttaagtagagacggggtttcaccgcattggccaggccggtcttgaactcttggcctcaagtgatccatgcccctcagcctcccaaagtgctgggaatacaggcgtgagcctccgcacccggccctctgatgtgcttttatgcaagccacaacttggccctccaggttgtggcctcagagaccacagacaataggctgtggcttttcttctctctgtttggtttttcggctgcgtggtcacaaatggcctcgtgacaacttggcagttaacccaatccttccaaccagaggccttaggtgttgagccagggctgcacacagctataccttcctggttcctgaggattgagtgtcccctgcgcgcttaaagctggagccagacgtatgcagctttttcccgctgtccccaggcaccgagtactccagataaactcattggcagcctttccccaggaagggctccatccgctcctccctcactctccctcctgcctgggatgcctctctctatgatcttttccttgagtatttccctaaaatgcctccccctcaataaacagccctttcttatctccataatcaccatcaatctctcctctgaattcttatcagtttgtcttttaagctctctttcttcttgtctgtcaaggactcggggtctgttaacgtacacagtgcctcatactagcaggcattctacgaaacgagcactgccgtgatttataagggacttgtagacgtctattcttccttcagggttttattttgttttatttgtttgggcctaaatggaaaatttgggcataaacacattaaagttgaggctttgatatgagtccccaaggggccctgcctccctgttcagccctgaattatgaatatcatcatcaccaggatccgtaacaacagtctcctaaacaaaaaacccaattgtgagcctcccagaggcacaggtttcactgaattgaaggattcattagagatagtgaggcatagtagttaagaccagggcctctgctgtcagaaagaactgggttcagatcctgttgtggccacttgtaggctgtgttacaagtttattagcctctctaagcctctggtttcttatgtagaaaatggaatgctaatacctataccctagggcggcttcacattgaccaatgtggagctctcagcacagagcatggcttcaggaatggtggcccaccacatggacacgtgtattcacctcccggagcaccttgtactctgagggtgttcctaggaatggcactaatagagttaggcatctgacaggtggcacaggcatgtttgaaaggctcggaggtaagaagtcaatgcattttgtcttttacaaggggcttttacctgtgtcatctcatgattccacacgacactctacagggtgggcaggacaggtatcatcatgcccatttttcagaggagaaaacttaggctcagaaaggttgagtgactggcccagtgaggtggttcatacagctagactgtgtccctgagacttaaacctgggtttgcttgttttgctacaactcctctttccacaacaacacactgggatgctcaagaggaatggagctttgctttgggacttggtgacaatgagacctgcatacataaggaatagggtggctgtcccaggcaggaacactttacaaacaggtgtacagtgagggagcatcatgttgggctccaggagaaagaattagacatgtatcactgagcaggggagttcatgtaagagtagtagaaaatggctgggtgtgatggcttctgcctgtaatcccagcactttgggaggctgaggcaggtggatcacctgaggtcaggagttcgagacaagcctgagcaacatggtgaaaccctgtctctactaaaaatacaaaaattagccgggcatggtggtgggcacctgtaatctcagctaatcgggaggctgaggcaggagaatctcttgaacctgggaggcggagcttgcagtgagccaagatcacgccactgcactccagcgtgggcgacagagcgagacactgtctcaaaaaaaaaaaaaagtaatataaaataatggaattaagattgaacatattctgaaaggtctcaacacccaaactaaggaattggggctctattaggccatgaggagccactgaagctcccttcccagaggaaggacatggcacaatccacagggcaacagatagttgaggacaacatggtggcttccaaaacttgactcaccaggaatggctgaagaaactgaacgtttgacctagaaaagtgaaaacttttgggagggaaagagtatttgccagacttgggggagaacacaatcattgttggaccaaggaaaagacagctttgttttatgtggtctctgtgagtgtctaggggagcagtgaaggtcagtgggtgaaagctctagggaaataaatgttcagttcaaataaggaagacttttctggtccttttagtgcactttaacccaagtttttttattcatttatgtgtttgttttttgtaaagatgaggtcttactatggtgcccaggctagtctcgaattcctggcctcaaatgatgctctcacctcagcctcccaaagtgttgggatgacaggggtgagcccctgcacctggccaaacctgagttttgtgagagcccacctgcaaaacactgggagggaacagtgactggtacagacaaaatccctgccctcctggagctcatatgaaatggggggaagataggccttaaacagaaccatcctagaaattaatgttatagccagagcttctcaagtacaagtattggctgctttgagaagtgtaaaatccatccaggcacagtggcttacatctgtaatcccagcactttgggaggccaaggcgggtggatcacctgaggtcaggagtttgagaccagcctggccaacatggtgaaaccccatctctactaaaaatacaaaaattagccaggcgtggtggcaggtgcatataatctcagctagatgggaggctgaggcagaagaatcgcttgaacccaggaggcgaaggttgcagtgagctgagactgtgccattgcactccagcctggtcaagaagagtgaaactcccatctcaaaaaaaaaaaaaaatcccccatcttaggagttgtcaagagacatgtgtcgtgctggaaagggctggatgatttctcagaagattctctgtctctacacatgttgtgaaatcttcagcaaccctaaatcccttaattagagggagagaaaaggcaagtgatcaattggcttcttttaaaagcccatatctgcatgcttcgtcttcactgcggtctgaggcgcagagtgtggccaagcaggaatttcatcctgtgtgtagctgggtggctccacctatgaattgaaaatcatttagctgaaattgtgacacagctgcaaattacagtctgcctgcaggctggggctgtggctgcggccatggtgcaatcctccagtacccaacattaagtaactcagggcagactcttactggggccctactgctggtcagttgcaaagactacaggcagcttggctggaggagctgtggagggtagaagggaagctggctgtgtaacactagcctgtctacagaggagcatcatacccgcaatgtcaccatggctttcagcctcatgacagccctggaaggtgtgtgcatcatgctgatgaggataccgagggccaaagaagtaaaagaattcagccaacatcacacagtggacaagttccaaagcctggctttgaatccaggtcttttgactccaactcaggggtctttttactacattactctgggatcaagaccagctacagaccctcctagagaagaccaggtggtcagtggtcggacaccactgtccaaacccgtgggaccccttgcaaaacctgtggcactcggggcctttcaggctaataatatgattttttttttttttttgagacaaggtctcactctgccacccaggctggagtgcagtggtgcgatttcggctcactgcaacctccacctcccggattcaagtgattctcgtgcctcagactcccgagtagctaggattataggcacgcaccatcatgcctggctaatttttgtatttttagtacagacagggttttaccatgttccccaggctggtctcaaactcctgacctcaaggtcccacctcggcctcccaaagtgctgggattacagaagcgagccaccgcacccggccaggctaataatataatattattaatactaactttttacactgggctgtgcccagcgccgtgctgaaccttttacacttgctgtctcctttgattctcagagcaattccactcagttttacagttgaggaaacaaagcctacgagaggtgaggagacttggcagagccaagactgtgtgtcttcaggttcccttttaaggggagcaccacctccctgtcacctctgcagctttccttgtcaggtcattgaaaggagtgcccggggtctgattttccttggctcccaggccaacagcaacaaccacaataataagcaaaacccctcctttcctttagaccacacacagaagcatacagagcactttcacacccattcatcccatgccattcatggagctgtcctccagctttctggcaggatgaacttggcgtcatgaggcctcgcccagagtcacagctagtgcccgtggtaggagccaagaccacacatgagtctcctcttgggtccaggctctttccatgtccctctctaccctctgctcttttcttagtcatctgccagagccaacagtgcatcccattctgcctggcatgggtgcacagccagctgtcttagagccccagaggcctgggaaaggctgcctcatttaggcgctgacctccaaggttaagcaaacacaggctctggagccatttacatatgggtatgaatctcgtggttggagactcaggttaatctctctgtcccccataagatggaaataataatagcccctttgcatagggttgctatgaagatgagaaaagctaatatatgtaaagtgtttagccagtgcctgcccacagtaaacactaaatcaattagttattattagtaagcactaaatcggtagttatgattcccatctttacagtgatattgattcacttattcaagaatgtgcatgttccagccacgtgtcaagccctgtgctagattctgagaagaagatttgaatgatatgcaacctgtaccttcaaggagctcagtctggagatggggacatatataaacagatagttccagtgcagtggatacatacggtaatagaggttctaagatgtacaaaaggctgtaggggcctaaaggacggagaaaggacactgatttctctttttcaattttccaagccacctgcctattccgtcttctctttctcgagatcaaacattctcacttctctctaaagacccaaccttgtcatcatggtgctcaatcttccttccacactgtgatgctggggaaagccttggggcatttctgttctctcgtgaatccttgaagcctcactttaaaaaatatatactcactcctttgtccatcgtaaaccttgatatttgtaaatatcgataataggaactttgaaaaaacatacgcccttagaaacaagcaagcaaacaaaaacacgtagaatgtcagagcttctccccactccacaccctttctttaaactgatgtcaaggtgggcccagtgagggtcagtgacggaacctgcagtctgagaaagacatggcagaagcataaggttagaggctgttcctgctgcctcattaaaaacaacaattttcccccaaatctggactgaaactgacattcaacgccaagtgtgatctcagtttaacctgccctggtagatatgcatacacttcccatgcgcaccatctcatgtgatcgtgtccacagctttgtgagttgagaggggtgggagtgattatccccaaccacaagcaaggcttccgggcttcaagggttggagaccacccagggctcggccagcatcagaaccaacggcttctaattccaaatcaaatgatggtttatgccacactacaaccctaaacaaatgaactgtgatgtgtctcacttccctgtgcaagtggaagatgctaatacatgtgtatcatgagaaaggacctcacaattttcttcttctgggttctgctgagacgtttctttgattcagagagaacttcccaggatcagcaagaaaagcatgtcatcatttcctaaaccctacaatccaggaaatagtccatcattttataaaattataaaagcgaactatttgagtttctttattatctgcccccttctccccaagctggtcttgtacaaacatgatgcacgtccattgggtgacaagtctgtcgtaagtgaaacgtttacaggcactacaggaatgacctggtgcctcgcccacttcattagaattctaattggggtgtgtaggagaggattctataaatggtaaggcaatccttggcagcctgtctgtcagcactgtccgtgccattcccagaggagcctgagaagaggcagaggaaggcgaaacatggctggtgagtgcatggcatcttctccatcaggtccttgccagaagcctgtgcttcccctgggccagcctgccaagccagagtgtccggccaggacagctgcctgccttgggggctctgaaggccagacttcctattttagggtgctagccagaggcggctctttctcagtggtggttgggtccctctagcatattcttggggtagaacatcattggaatgtagctctgaataatgggcagggtgttcagtgcagctggacatcgcatctccttaggcagaggacaagctttgccttgtttgtgtttgcgtttcttttacacatccgtcgccacccgtaaagccaaagcagacaggactcgggtctcgtgtttctcagtgtagctgtatccagctgtcagcagtgtcagcaaagaagcacatctcagaactaccagggagtgagagtggtaacatgtaagttgatttgaaagaaaccattgtttatttcaaatcaacttacttaggagcattaggaatgctcctaagtaagctacacatcagaagcatcagacaggctctgtgtaagtgacttgatgagctgaagcctccccgtagcaggagcaggtgtgccacaagatgtcctggtccacaggagagcaccagggaacaggggttacaaagaacaacaggaagtgcaggttcccccactctatgcttactgtcgaggatatgggcctttgttaatcagcacccctgctaagcagcatgctaattattatctgtcttgtgtgctcagcctagtaggttgacagggacgccaaatccaaacaagatatgagtcaaacttgtaaaatattgtgaatggcgattagggctgctggaagattggccaaagacatcactgagccaaatgcaacaggcaaatgctggctacttcagaagccacaaaaactgggacaggtgattgcacattaggccccctcccctgtctcccattccttgctgtaatgtacagcatggctgggatgctaagaagaggagctctggaccctacacactgcagcaagaggggaggtcagatgtcatctagcccatctccctccctccaggaggtggctgaggcccaggaaggggtggaaccttacacacagtgaatccatcgcagagccagctaggtctcagcagtgccctttccaccatgtcctgctgccagagctgagctcctacataagtgcacataacatctggaacataaaaaagcaattctgaacctggcttctcatttgagctttgtgaccaactgcttgtgtgttctctgccacccctgagcctcaagttttcaagatgaaagctttgaaatgaatgcgttttgaggttccttccagtaccgacttttctttctccacaaaaagaaaccagagccagggagtggacaggcacgtgcccagcccccaggaatgtgcacctcccatccctgtgcaggacctcccgtggactctcaggaatggcctgcccgctgtgaggcatgattaaatgtctctgttaacaaccagagatgttctaaagtcacaacagaatgaggctggtggggagaaaatcaattttgaaaaggtggtggagagacaggcgaatacattcagtcccttaaatttgtcccacttgcagttcccagctcagctccgagtcactcagccaggaagttcccaatcagtgtttcttggatgaatgaatttattcactgaacacctaagggagaagagctgtgccaggtgcagtgggaaatatggaggtgaatgagatgtggttctgtcctcggtagcttttagtctgatattttttggtaccaccggttttttaggtgagcagcatgcaaggcagactgttattaagctgcatgacaaatacaaaacaagtgctacggggaccaacaagagaaggagattagtcttgtctggaatttgggatagggaagactctgaaaaatggtcacagacaatgagttggacttggtctggagaggttttgcagggcagagggaacaggaaaataaatgtcagtgtgagcaggtgtgacccaggggactatcgggatgacaggtgtgctgctttgagaggactctgtgtccagctcctaatttaaggttcttgttgcaatcagaaggggttccattattccaccccttggtggagaaggcagcctgggctgtggctggaaatgaaggtagtggaggaaggcctggcagtgatccgcaccaagtggcctggcatccccagagtgggtgggagagcagtttgtgagcacagaggagggccccagtgtggaggggaggcaagattccccatccccaaagccacttggaagccctgggttagtggcagagttctcagggtacacacctgaaccacaggcttctgcctgcaaatgaccagaacctctgttttggggactaatggctctgtccctctggggcagtgagctttcttgccaactacttttccaggcagagcactggccttggcttcagggacttcccatctcaaggcctcatttcctccacccccaaaggacctgtaccattcccagcgtctgggtctaccaccaaaccgttctccttggagctgggacaccagtcgcccctcctcccatggaagcggtcaggaattgctcttgggttctggcctccttctcttctgtaaatcttctaggtgcttcctggaccctcctcatatttttgtgtctggcactgggaccaaggcaatatctactctctctctctctgaaaaggagatggcccctctgggctcagagtcttgtgactccagctgctcattgtttgaaatgaggaccagctgcctcctgtctgcccggctccatggccttcttccacctgggacagcggctactccctgttccttagagacagcccatgagcagcttcattccaccgggaatgacagctgcccgtatttcagcgtttgttcctgtaggattccttacaggatagctgatgggttaagagtgcaggttcagaggtgctctctggatcaaggctccactctgccccttacgagaagagtggtcttgggcaggtcacttaacttgtgtgtctcagtttcctcatctccaaaatggggttattgcagtatccacctcatgggtgcttacgattacctggaaattttttcatgagcctgttttctccttgtcttggggggacttaagaaaaaccctatgagaggaattacattttctaatcaggggcgattcccaggggaccctctccattaagcgcctcagcacaagtcctccccactcccgcttcatccattcccaagtccaaagtcctcatgcctgagcactccccttgttcacctcaagtaacttcatgcggctccaccccgcagggctgtctctgcagatggagcaatcattctcctccccagggcccacgtgccaggctggggtgtgtgctgaagttaggaaatctcgcttagcagtggagggcacaaggccctaggatcttggtaggagctgagagatgggagtcagaaggagtcagccttcccctccctcagcctgattttccttatttgtaaaaagaggacagcgactcctcccctgcctccttcctatagctgccgggtggctctggtcaggtaatttatgtgaaggagcttttataagtgtagatgataaacgggcctaaggtagtgaggtctcagtccctgctgcacattagaatcaccaggaaagctttaaagaaaatgctggccgggtgcaatggctcacgcctgtaatcccagcacattgggaggtcaaggcgggtagattatctgaggtcaggagttcgagaccagcctggccaatacgacaaaatctcatctactaaaaatacaaaaattagtgggacatgctggcacgcacttgtagtcccagctacttgggaggctgaggttacagtgaggcaagagaactgcttgaacccaggaggcaggggttgcagtgagctgagatcacaccactacactccagcttgggcaacagagagagactccatttaaaaaaaaaataaagaaagaaaggaagaaagaaaggaatggagggagggagggaaggaaggaaggaaaagaaagagaaagagaaagaaatagaaagagaaagaaagaaagagaagaaagaaagaaagaaaaaaagaaagaaagaaagaaaagagaggagaagagaagagaagaaaagaaagaaaatgccagtgtcatccctaaccaaagattctaattgaatttgcctgggatgggtctcagaccaatagaacattccaggtgattcttctgggcagctggggttgagagcctctggtctcagagattctaaactctctcttaggaagagaagtccttctgtcctctccttttgccctgaccatagggtgtctaggcagggagtaggctgtggatggcccctccaggacctgtgtctaagtcattgctgccttggttggctacagggcggcagcttggggtcatatctggtcaggcaaaattgactttcagtctgggcttgagtccagcctctgcctgagtgtttgatattgagtaagtgacttcacctgactggacttccaaagccctcatctgtgaaatggggacagcaacaccattttgatagtcagtatttcgtgactattaaaaaacataacgcaggtgaaatgcttagctcagtgtctgacacataagaggtcctcaatagcagcccattaaaagctcaaagcctcttctgctcttgggttgtttttgccattacatatgggatcccaacagtattagtttcccccaatctctgggggccccggtgctagtgatgggtatatgttgaatcccaacaataaccctaagagagaagatgttccaggtctcactgtccctcttctacaggtgagaaaagtacaattcagagacattgagacccttgctcagggcctctcaccggttcaggcaccaatctggggctcatttctcttcatcctcaccagccccttactctccctgaatgccaagaaattgtgccacctgtgctgcacagagcttgaaaatgtcatgatatgtgggggaagttaaaaggaaatgacacaggctagaaagagagaaaggagagagagatgggtgctgagcaggaaagcacgtgtgtccttggagccagaggaggggccagccaggagctaaagatgttcccagtgtctaggggtgggaagtgggatgactcacagcctgtcggtgaccaggatctgagacccggcttctgggctaagatctgcttcaactccgtgacttcccctttcatgaaggggagatggcttcccatttcagggcctcagctttctgacctgtcatgtgggcatactagattacatcactgtttttcaagctgccagttgccatccattagcaggttgtgaaatcagtttagtggactgtgaccagccattaagaaaaaaaaaaaaagcagaagagaaaatatcagagtatattgatacatagtaagcattagccgtgtgaaaccttgtgtcagttccagatccatgtatgtaaagactattagatagatttcttgatttggcttctctcaatagagcttaaaaaccactcagctagatactttttagcatttttttttttgagacggagtctccctctgtcgcccaggcaggagtgcagtggtgagatctcagcccactgcaacctccacctccccagttcaagccattctcctgcctcagcctaccaagtagctggaactacaggcatgtgtcaccacgtccggctaatttttgtatttttagtagagacagggttttgccatgttggccaggctggtcttgaactcctgacctcaggtgatcttcctgcctcggcctcccaaagtgttgggattacaggtgtgagccaccgtgcccagccactttttagcatttctgtcagccctcattaactctagacttctgtaaaataaaaatgcatctatgtctagagaaaaggtgtgggaagtagagtctggttgggggctagggatagtcccagccactagagtagcatcactccatgttgggccccctgtcagcccctctgtggtgtggtcctccctggaacaggagatgggagccccatcacacacccagcgaccaagtcattctcacccgtgtgctgcaggtgattcaattatacagccaggctgacaaggattgagacggctgactagcaacttccctttcacagtctggagtctttctctgtgcttttcatgtgaaagagggaccacagaataaatgggcaggggttatattaacatatttgtgattatgtttggctgtgattaacagtgaacccccccaaaaaacaatagcttagaaaaataagacagaagcttatttcttccttacacgaaaggcctggaaccaggcagttctgggcaggccaggtggtggcaccatcctcaggccctagctctgtccagtctcctctccaccatcgctagggtacgtatggccctgcatggtctaagatgtccgctagaggcttgtccctgtcacacccacactccagacagcagaatggaagaagaggaagaaaacaggcaaagggcatttgccaactgtttatataaagaggttttctaaaaaaaaaaaaaaatttaaaacaggtattcaaacaaatattaccatgtgcacattcatagcagcactactcacagtagctaaaatgtagggacaacccagatgtccatcagctgatgaatgcatcgacaaaacatggaatattcatataatagactctcattcagccataagaaaagaatgagctactgatgcatcctccaacatgaccgaaccttgaaaacattatgctaagtaaaataagtcagacccaaatcacatattgtgtggttccatttgttaatttatgaaatgcccagaatagggccgagcgaggtggctcacgactgtaatcccagcactttggaggctgaggtgggcggatcatttgaggtcgggagttcgacaacaggatggccaacatggcgaaaccctgtctctattaaaaatacaaaaaaattagccgggcgtggtggtgcatgcctgtaatcccagctactcaggaggctgaggcaggagaatcacttgaacccggaaggcggaggttgcagtgagccaagatcgtacctctgcactccagcctgggcgacagagggagactccatctcaaaaaaaaagaaaagaaaaaaaagaaaaagaaatgcccagaataggcaaatccacagagacagaaagagttggggttggcaggggctggggataggcggaaatggggagttcctgctaatggagttgggggattctttgaggagtgatgaaaaagctctgccactagatagtggagataattgcatattgtgagtgtactaaatgcccctgaattgtacattttaaaatggtttaaatggcaatttttatgttgtgaattttacctcgattttttaaaagagagagttcctggaagttaatacctgtaacttctgccaaaagcttttggcctaaatttaccccatggccaccgagccagagtggagcctgggaaagtagtgcctgcacatatgggggatttcattaccaggaaagaaggaacgagtgaacgttgggatagatatttatctggcagtccaccacattagaattgctgctggcactgatgttctcaggaaaaaaaatctgggaaattgccccaggcctgacactggagttaagcattaactcagggaggtggcacggaatcagagtttggagatgtcacactgtgggcaaaccacctctctggcctccatgtgctcacatctggaataaaggttaggagtatgtgattgttctctaaggtttttcccgctgatgtcttttaagtgtgtacgttgatgagtcagttataagaatcatgcgactcctgtctcttcttctcctcccttcacccagactgtgcagaagacataaggtgcagaagacagccctgaggctcgtaaatatacaaaaagctgtaaacctgagaaccttagacagctgagtaccttcccctcctctcctttcctacacattctgacagggtgggctgtgatgagtgacatgtcaagggctttgggattggggagacaggatcattggatccttgaattgggggctggcagagcaatcctagggttaagggacaggacgatgactgagggaggcagccagtgaagggttcagaaccacactggaagcttgatgagcacgctctcagctggcagcccctactcagggatgcggggcaggctgtcccctttgtccagctcccctgaagacggctcttttggaagagatgttttccttccaggagctcgctctctcccctctgtcggaatccaaatgctagcaggtggacgatgcagcatgagggcccctcaccacttagggcaccttctggactcaaaatcctgcatgagaccctcttccagaaggaggtttcgggaccacagtgacagggtagagtcagtaagtcctggtgaaaaggaaacaccattttttcttccagactactcttaatacttcttaaccgccaaatgtgtggggtttgttctcataccaagcgatttgcagtggacacccaccgggtgtcctacccttcaactcaattctcacactgtttggagttagcacacagcctacagggagtgcacacacccctcagtcccacaacactgcccccacttcagatgccagtgcttcagaagttgtcacctgtgcttctgactgaccagatttaaatcgggagttcccaccagcccattctcaggtttgaagatttgctagaacagctcacaggactcaggaaaacagacgaccagcttatggtaaaaggatacaactcagaagcagccagatggaaaagatgcctgagacaaggtgtggggaggggcacagagcccccatgcccccctcccagcacttccatgagttcagcctggaagctcctcaggccccatcctttggggtttgggtttttatgaagacttcatttataggcatgattcattaagtcatcagtcattggtgatgaaatcaacctccagtccctctcccctctgtggacgtgggtagtgggcataaggctgaaagtcccaagtctctagtcactggttggttcccctggcaaccagctcccatcctgaggctatccaggagctgccagtaccagtcatctcattagcatacaagaagtcactcatcattttggaggttccaaggctttcaggaactttgtgccaagaaaaagcagagatcaaatacgtgtttctcattatgccacacctgggttcaggatcctggctctgccaatttccaggtatgtgacctcagttaaactacctggtctctctgagcctttgttcctcattgtaagatttcactgaccacatacataacatgttctgtggactgcgcatagcagttggcataaagaaggctgatgacaaaagtgagccccacttttcctcctcctccagctcggagcagtctcgcacatcccacagccaccctaacagggagcaaggctcgttggtgctgccggggctcacgcttggtgtcagaaaaggcagagatgatgagtgcaaatgcgagctctggagcctgcagtcctccactgtggagtggggtgacaacgaccaaggcacctggtttctctacaccttggcttccttgtctgtaaaacaggacgtctacaagtgcctgccttatggagttaatgagctaatgcacgtaaacactttgaaagatggctggcacacaaatgcccagtaaacttcaactaatagtatgatcaccaccaccacagtcaccccaggtctgacctagtgtggcgtgcaaaatacccctcatattcttcctgcaggtttccctgttgggaggcaccctggagctcagttttttctttttcatcctctctagggacaagacattggtctctgggatgaatgggaggagcctctactattgacacagccacagcaaacaatgcatgaactttgctggagcaaagaagggtgtgggcctgttgggagaggcaggtgccagcaagagatgctgagtaccccgcccctctttccttaccactgtgctggacaaacagccatctggagcagactttctactttcaaagaactcatggtctagaatgagctttatctggaaaaggacatgcatcctttgggatttggaggtggggtgaaaaatctctaagaaggctcaagtgctctgaaaccacatgttccatagagttcctgtttcctaaaaatatatatttccagaggttcttatttgagaggtcttcttttttctttttcttttcctttcttttttttttttttttcattttgagatggaatctcgctctgttacccaggctggagtgcagtggcatgatctcaactcactacaagctctgcttctcaggttcaagtgattctcttgcctcaacctcctgagtagctgggattacaggcgtgcgccaccatgccaggctaatttttaaatttttagtagagacggggttttgccatattgtccaggctggtctcaaactcctgacctcaaatgatccacccaccttggcctcccaaaatgctgggattacaggtgtgagccactgtaccccgccagcccttcttttttctaaagtgagtaaagttttaccaaatctcaactggctgggatgcacagaaagtagtgagcaaggttggcaggaggagaggggagaaagttgggggccatttccctagagagatctggcatctatcagctgtacacagccatctagggctcagtgtttgccagtgtctgagttctgggctgtctctgttggttattcaggtacagaatgctcattttccccctgctccctctgtcctttctgtcctcccttatttcttcccttcattcaacagacccttgttgattgcacaaatgtctcagtttccctgaatttgtgcaaaaacctattaatttattctttcaatgaatatttgttaaatgaatgagtgagtggatgtttgaatgaatgaattttagcaccctcagctgggagtaagctcacctcttgagtcccctctctccagtggcaggttggctcaccatcccagggagcctgcattttactggagagggtacctatggtgaccctctgccccatctccagtgctcttgagtggaagcccctccgcagtcctgccccaacccccactctctcctgtctcacctttctctcttctccacgcagcgcccctgctccagacaagtaacatcactccttctcttgtgcctttgggcctctccttcccactgtctagaatgcaggcagctctatgggcacccggcaaaattctctctcctttcaaggcccagcattttcagtgtagcttttcctgatccctacaactgaaagtgactttttttgcctgcctgcatctctcatacacctttcctggatttatcccattccaccattcatgatcacttatgcttgtcttatccactgctgaagctcttggagagttataactacacttcatacacgtgtacactcccaacattgtgcctcacacaatgtcctatgaataatagctgctgtaatatttttattgaatgaatacttcatattcacttttccttgtagactaaattttcagctgtcgtcatgatggtcatcgcatgatattagtcttttctttctttgttcatttattccttcatccatttatttacctaattatcctaatacagtcaagcagtgtgctaggcatcagaatataaagatcaagagggggccgggtgcagtggctcatgcctgtaatcccagcactttgggatgccaagacgtgcagatcacttgagcccaggagtttgagacaagcttgggcaacatggcaaaaccctgtctctacaaaaaatacagaagttagctgggagtggtggctcaggcctgtagtcccagttactagggaggctgaagtgggagaatcccttgagcccaggagccagaggttgcagtgagccgagatcacaccactgagctccagcctggggcaatagagccagactctgcctcaaaaataaaatagaataaaagattaagaagggatgttctgatgcagagagatggacacaaataaaaaagagctgtgtctggcactggaatgcaccttcacactctcatcagagccatggcctctgtaaagacagagaccagtttggtttgcagaagaatgggtgatgtaacctcttaaacataactcataggaagatttcccaaaaagtttatatcagcgaacacctggtacatcatggcatctctcataaacccttctcagtttagctccgtcatcttcacaaccatgtgagagtaaatcaggagggtggattttgagatgtttgtcctcgggtcttatccaggtcattcatggcctttgacctgctcctataaatagctcttgccagtgagcatttgcaagtcccctctgggctgaggattccccaattgctaggcctagaaacactgctcagagtctccgccagcctccctagcatcagaggcccaggccaataccgaggcattgcaaatacagggaaggtaaaggatgcaaaagtaaacatttgctggatactggagaggcgaaacatgcttggtgtctggggacacacaaggggacaacaaagaagccaaaccacggtgatgggggtgagagaggtatcctcccttcagttctttttttttttttttgagacagagttttgctgttgatgcccaggctgtagtgcaatggcgtgaccttggctcactgcaacctccgcctcccagattcaagtgattctcctgcctcaccctcttgagtagctgggattacaggtgtgaaccaccatgaccagctaattatttgtatttttagtagagatggggtttcaccatgttggccagtctggtctcaaactcctgatctcaggtgatctgcctgcctcagccacacaaagtgctgggattactggcgtgagccaccacacccggcgcctcccttcgtttctgttggagcccccatccacaaagcaatgagaaatgctgaaagcagacagaacgtaggtgctctggtgacatgtactcctcattgattggatggagctccactgaacatttggcccgttccttaagggccgagtgacagctcagcagatggaggggggaaagacactctcagctgtgggaacaggatgcacagaggttcagctgtctgaaagggcagagcattttctatgatcttgcatcctgtgagctggcataactgagtctggaaagattgagtgggaataggttgtgatgttcttgctatgcaagatcaaggtctttggattttaatgtgattctttctaggaatttggctctgcccttgacaagcctcaccccaaagctgctctttggtaacttacacccttcccccacaccaccatcccttgcctcctaggacttcaggttctcctttctgcctcacagctctaggagtccagagtatcaactggcagacggccttcaaccgacaagcgcatcacacagacaagttctccagccaggagctcatcttgcggagaggccaaaacttccaggtcttaatgatcatgaacaaaggccttggctctaacgaaagactggagttcattgtctccacaggtacctgctcattcccctccttgcccaaacacacacatacttgagtagcccttgttcattcaaggactgacggggaccacactggggccactggcattgggttctagccttgctctgtcattgattcagtgtggccttgggcaagttgctgtccatctctgagcctgagagtcaccatcctcaaatcaagagggatctggcctgtatgtttgttccagttacttccagtggtagaatatggcgcttcattggctcatgtcccccagaggggggttgtattggaacctggtctctccacagtctgaccagtgcttgttggttttctcaacctctgtcttctttgacagggccttacccctcagagtcggccatgacgaaggctgtgtttccactctccaatggcagtagtggtggctggagtgcggtgcttcaggccagcaatggcaatactctgactatcagcatctccagtcctgccagcgcacccataggacggtacacaatggccctccagatcttctcccagggcggcatctcctctgtgaaacttgggacgttcatactgctttttaacccctggctgaatggtaggtgtctagccacccacactctcagccctggcctaagctagaaaagaaaaaggggatgggggaaatgatcttcacaggctcaagtttgattagggaaagtccatgggctgtggaaagggcgcagaagctagaaatgaggagctctgacacttaagcagctgtctgagtgtgggcagtccttctatctctccaagccccaatgtcctcaccattaaatggacatcctgctgtttcttctgggaatattgtggagatcacattgagcttttacaaactgcatagcatggttcattttaagggacaataccacagtataattccacagcatggagatagctttctgccagaaagagcaggtgtcttatccctggggtctcattttcagaccctcgggtcatcctagcttctctttccagctcatagttcccacaattggagttggaagagttacagcccaagggtcaggggagggctaaaggtggggcttgctccaacccccaggccggttcaggagtgggaggagaggaggaacgatccctacagtcctccgaggattctagtcgctggtgtctgctttttgtatcaaatagtggatagcgtctttatgggtaaccacgctgagagagaagagtatgttcaggaagatgccggcatcatctttgtgggaagcacaaaccgaattggcatgattggctggaactttggacaggtaaaagggtcataaggaagctaagggtaatgtccctgttacccaagaagctcagcagcttgccccacagatcaatgggaagtcccacatctgtccatctgcctgcccttctatttgttcatgtattcagaagactttcattggccacctattatgtgtcagaccctgggatccacactaaggataaaggagatgaataagacagatccatctttgagggggttgcaatctagtgggcaagacagaacacacacataactcaattgatgcaatgaagtagtattggtgccaggatgcacaaataaatataaggcccccaagagacactggggacagtaatgtagcttctgtttttcattccatgtaacaatgcgatgacacttccttagtgtgcccactcagcctttccaagccacacccttttgttcctttattacagcaatccccatttgagtctacagagttctcagatttggtcagtttagaaaactttcaaggatgccctccaccttttagtttatccaccagacaaaggcattagaataaagcacctcgggcggggtgccttggatatcagaaagatgtgtgcttggaccatctacagaccctgtctgtagtcaactggagcaagttgggaggaagaaaaaagagaaggataggacatagagtgcacctaggagtggaagagaggctatttttttttatggcatggttagggagggcctcacttagaaaggagcctttgatcaggaacctgaaggagatgagggcaccagacagagatcttgggaaagagcatcaggcagaaggaaaagcaaatgcaaagacctaaggcaagaggagctcggccttctcagtttgagaagcaatgacttcaattaagtcttattttgtgaaaatcacttcaaatacatatactttagcaagagattttatttttataactagttctccaggagtctcaataacgtgctcaagattgcaggcaggccaggtgcagtggctcacgcctgtaatcccagcactttgggaggctgaggcgggtggatcacctgaggtcaggaattcgagaccagcctggcctatatggcaaaaccctgtctctactaaaaatacaaaaattggccaggtgtggtggcacgggcctgtaatcccagctacttgggaggctgaggcgggagaattacttcccaggaggtggaggtcacgatgagccgagatcataccactgcactccagcctgggtgacagagcaagactccgtctcaaaaaaaaaaaaaaaaaaaaaaaaaggatgggaggcagagctagaaggaaactctgagatgagtttggcctaattatacagatggagaaatcgaggccagacaggctaaacagcttgctcttgaggtttgtggcagccggggcgtcggctagaccaagccacctcccatgcattcactttaagagagtttgcacaaggtcttatgcttttttatttttaataattttttatttattatccttttctgtctcttttttgttgttgttgtttcaaaagctgcctttgaggaaatacacagggtcttgtgtgtagtgagtgctctggatgagtttgcggggttgagggctgggcatggtggctgtcctcagtagctctcagttccagaggccacagagtcaaaggatctgatagttcctgtggttcttgccagtgcagttcccttcttgagccaactctccttgtcatttctttaattgtaatgtatggtctcgttctgaacagtttgaagaagacattctcagcatctgcctctcaatcttggataggagtctgaatttccgccgtgacgctgctactgatgtggccagcagaaatgaccccaaatacgttggccgggtgctgagtgccatggtgagtaacaggaaaacgatcacagctagttgtcatcatatattgaacaccacctatgagctaggcacgcacactctttacatatgtcatctcattaaagcctcaccaattacagctggtggttagaaccatccacattttactaacttggagcacaaggcccctctaagttacagggcttgcctgaggcacacagtgagtatgtggcagaagcagagccagacccaggtccagccagcttcaaagccctttccaccacatcatgaagcctttctcagaggaaaagggagcttgctctttgagtgcctgccaaggatgggagaatgcaaagctagggctctgctccatcattgggcctcctgggaaaggaagcgagaccctgattgagctggaggtggtgacctcctttgcctaactcatctcttccacagcccagagcacagcccagagtgtcagatggtaggctgcctcattcatggtctagatggggaaacaagcttggagagctgaagtggcttgctcaaggcacacggcatgcaagtcagaccagaacaaggcctccatggaaaaggcctgtgcccctacaacacacacaaacacacacacactcacacaatcacacacactctctctctctctcagacacacacacacacgagctagatcccctagaaggcatctatggctctgcactcattgtgtagagaatatctccaaccagtctgggcgtggtggctcacgcctctcatcccagtgctttgggagatggaggtgggaagatggcttgagcccaggagtttgccaccagcctgggtaacgtagtgagacctcgtctctacagaaattaaaaaaaaactagccaggcataggcagacacggtggctcacacctgtaatcccagcactttggtggggagatgacttgagcccaggagttcaagactagcctggacaacatggcaaaaccctgtctctacaacaacaacaaaaaaaaattagcagggcatggtagcatgtgacagtagtcccagctacttgggagactgaggtggaaggatcacttgagccaaggaggtggagattgtggtgagccaagatcatgccactgcgctccagcctgggtgacagagtaagaccctatctcaaacaaacaaacaaaaattagccaagcatggtggtacatacctgtattcccagctactcaggaggctgaggcagggggattacttgaacccaggagcttgaggttacagtcagctatgatggcaccactgcactcaggcctgggttatagagcaagaccctgtttccaaaaatattcatccagaatatctaaacctagatcaacctgctcaaaagttgtaagttaagatgcaaaaagtcgtgatcaggcacagtggttcacacctgtaatcccaggactttgggaggctaaggcagagaatcacttgagcccaggagtgtgagaccagcctggacaacatagtgagacctcatctacacatacacacacacacacacacacacacacacacacacacacacaggagccaggcatcgtgacacatgcctgtagtcccagctacttgggaggctgagctgggggaattgcatgagtccgttagttgcaggctgcagtgatctgtgattgcgccactgcacttcagcctgggtgacacagcaaaagcctatctccaaaaaaaaaggcgaaaagtcaaagtgaattctttactttaatcctcttaaactaagtaattacccagaaatcctgtaacctttatttatttatttctatgtttcatggtttaggcatttcttgatctcttgacttttgagttggatatgtccatgctaatgagctagttacttggttaaaaatgtgaacaacttctcagctgcatgataaatatccggggtgcatctgagagggcttttggaaagagctgagtcttagactgagcctggcaagaaaggagtaaggtgggcccagggaacttagtagccgagggagagtatggagaggaagtgagcctggaacagaatcttgaaaccaaatggcctggaagaggtgggattaaagccctggtgacttagaaggctgagtctctttggcctaggagagagtgggtgaggccagcggctcctgcagctgctgactcactcgcaccccagggccaaaccactttatcgtggagccaatttcctcagctgcacctcccagatgctctattcagacctcccagctgggctgggccatgaactaattatggcctgtgcggagctttgaagtgctcagctttcagccagagatgaccgtgctgatagccactttggaggctggagcaccagtgactcaggagatggggaagggctgcgcaaccttccatctctaaggaggccctgtcttgcctgactctgccatgacagcccaggacctcctggaaggggtgcagaactcactactgcactgagggcctggcaaggctgggcatggcctgtcctgggcaaggatccctctgtgtccagactgtccattctcataggccttgccacttacaggcactccaaggagaaggggtaggacacacaggctggaggagccttcagagatcctggtccagcctctcattgcacagttcagataaacgacagccaaagtttcataaaccctgacccttgactacaaaagacacctcagagcacctttgtcctaactttcccttgaaaattcccttccctattggaaggtgaagaactaaggcctagagaggtgaacagacctttgtgcaatcatcaagttggcaagtggcaaggtggggcttgtaacctcagtgtctccttctctcttttaacttttattatggaaaagttcagacctacataaaagtagagagaaaagcataatgaactcctgtgtctgcatcacaagcttcagcaattacctcttcaaggctggtgtcatttcatctgcgaccctctctttcacagatgatttgataaatcttagacattacacatttgtcataatttcacctgtaaatatttccaagtgtgtccctaaaagacaatggaactcaggtctcgatttctagtccagtgatctttccaggctgcctcttggttgtgtcacttagattagaaccttaaattgaataaatgaatgagtaaactaacaaatgaacaaatagctgaatgaatgaaagaaaagaaatactctatctttattctttccaagaagaagttagttgctaaagttctaaagtgatctttttggccgggtgtggtggctcacacctgtaatcccagcactttgggagctgatgtgggcagatcacttgaggtcagcctaagcaacatggtgaaaccccgtctctattaaaaatacaaaagctagccgggcatggtggcacgcattaacaccagttactcaggaggctgagccaggagaattgcttgaatccaggaggcgaagcttgcagtgagccaagatcacgccactgcactccagccagggcgacagagagagactctgtatcagaaaataataataataataaataataataaataaataaaataaaaataaataaaataaataaagtgatcttttcgtaagaccatacaccaaaaaagagtttcaaaccatggactcccaggcagactgtgacagcagtgatagcctgtggattcttacctgccagaagtcctctgcaagctggagttgtgccctgccttgccacagcacaagctgtgctgtctgtttcccatgtcaggctgctgcacaggaatgacgtatggatcaaggacaatcaaacatggcctgtttgggaaagcacctctaaactcgtaaaccactccatacccctaagggttaagtgttacaatgatcatccccaagtcacctagaaagacaaagaaaagttcaatcatggcctttggcttccttcctcatctccccaccttgtcctctgaattctgcatgtcagtctccctaggaaaggcattagtgctgactcattttgggggggtggtttctgcccagatcaatagcaatgatgacaatggtgtgcttgctgggaattggagcggcacttacaccggtggccgggacccaaggagctggaacggcagcgtggagatcctcaaaaattggaaaaaatctggcttcagcccagtccgatatggccagtgctgggtctttgctgggaccctcaacacaggtaccttgggtgtggtgtgccttggctgggtcagtgggtggcagtgggctatgccaaggtaccatctccaccacctgagtcctcacgcccaccctgacttgcagcgctgcggtctttggggattccttcccgggtgatcaccaacttcaactcagctcatgacacagaccgaaatctcagtgtggatgtgtactacgaccccatgggaaaccccctggacaagggtagtgatagcgtatggtaagtatctcaccttttccctgaacttcgagcaccacatttgagtggcttctcgctctcaccatccttctgggacccaggtccaaacaggtgttgcaaggcaagtaacatgtcatcacagggtgtagaatggaactgctggcaatgctgattacacacttagcagcacccaagacacctcttctcggtgctctgcggtctgctagtctggtctatcttgctgccgtcagacaaaggatctgatcccagtgaaagacagggctcctaaattcactctgaatttatgggatccattggaccttatactactatagaatatacaagttgaaactattgcttttccagcaagaaatatacatttgtttcatttcaagtaatccatatgacttacaaactttcttaaagagaataagaaaagcaacacatcttctcttagcatatatatatatatatatatcatatatatatatatatacacctattgtataccttggttgacatcaaaagttcagagtttattctggattccggatgaaaacaattatttttttgagatggagtttcattcttgttgcccaggctggagtgcaatggtacaatcttggctcactgcaacctcaggctcccaggttcaagtgattctcctgcctcagcctcccaagtagctgagattacaggcatgcaccaccatgcccggctaatttttgtattttagtagagacaggctttcaccatgttggtcaggctggtcttgaactcctgacctcaggccatccacctgcctcagcttcccaaagtgctgggattacaggcgtaagccactgcacccggccaaaatgttttatatatatttgggcatttatattcctaaccataagtatgccatgtgcacactatcaatacacacacacacgtaatttaatgatagatgccactggaagtaggaaatgtgtagacatatatctgtaactgcatagagcactagatagatagatattatatagataaaaatagacattgttacaactgtttaaggttatatcatataccaagttattaccggatggcaattggcaatgatgtctatatctgtagatacacagagatatctatgtatctatataaagtacccatctatctattgttttaatccatttcaaaggctacacacacacataattgctcacatgcatgtatgtggctagataatcgtatgacagatgtaatcttattttcagatgttcaattttgagatagtctacataaaatgtttgtattacttatcattcccagaataagtatatctaacttatctgaaatgtgcttaatgtaactaagggtataaaatgaaacgaaaatagataataatggaaaacactgttaaaacaaataaataacaactccatgccagcaaccgagttgagtaataaaagcatcccttcccttctgaaggagagtgaggtttatgtaactcaccccagagtcaatggattctggggttttactaggggagagaaagcttatttaaggagtttctttcttgatctgcacatacacaactttctctctaatgatattgcttacttgtggccagactttgttttccaacttctcatgaatgagtgtcttcttttccctgggcttttctttgttcttgtgtccaaaatcccatcgcaaccagctctgatcactggggctatgccattcctaactttagtttcttctacaaaaggagatggttggtgagacaagttgggggtcccctcggcataccctttctgtgattatcctgtacattaggaactgcagggacgtggaaagcttaagtctcagttcctccactgaaagcatttttatggtgctgttaggaggcacggggtggggaggccactagtagaggctaattagcaacacagcatggtgtgtgatgcccaggcaagtgactgagacagggataccaggaactcggaggaaatcctcaaggaaggcgtcctggaaacaggaaagtgaggcttttaagctaaatttagaattagaacccaggtctcctggttagtgattcacactgccccccacatcagcttaacatcacctttgggacaagtaggagctgatggagacattccagggtggctctgtggtcatttctgtggcctcatgggagggggccaggcgcagaagctctgactgttcctgaggatcttgtcacccctcccttcctctccccttttctgaaccttctcagaaagccaagggagctgatagttactccctacaccattccctacagctgatggttgggggagccagccctggagggcatgaggacagggagtcccaagcactagctccagccctaccacccaattgctgtgaggcttgcgcaaggcaatttatcctcctggtcccaagtttcttcatatgtgaaatataagggttggcctaggactagatgatttcttaagtcctttgccagcttaaatgtttaaattctcgggagcttcagcccactccactttctataagggagctagccctcccaagggagccctgctgttccttcctccttgaatcccatgcaggggagagctaaaccaagagccagtttctgcctggcgtgaaattactaagctattcttataagggcaaccggagtttggacagaaaacctctgacatgaatctttgtatgttaccaaaaagtgttgaaagctttagaaccgtgcccagatttgcctaaagtaatagaatgtgagaatcaagggagattaagcattagaagtgcttagtaatagtaacagcagcaactaataatttgttgagcagttgttgtgtgccaggtactgttataagtgcttagatttcatcttcacaaatgacgtaggcattgttattttcatccccaatttatttttcatggatgagaaaacaaaggccccgagagaagtaacttgtctaagggtaaacaccgggagacatgtagacattctaagcgcataacattatgtaagttccttgcctttgctacacctcaatttcccacttgtaaaacaaagggccagatcaggggacctcagtgacattttctaggcctttcttttaatcagattcacagcagccagtggggtaaatttttttctaagccactctgctcgtgccaatggtttggcttaagagtcacgcagttccggagtattcactctcttcagagtgaggacacttttcgggggagcttagtttgggatgcttctttgagatgtcctccttcgggtccactgcaaaggaagtctctggagcctattcagccaccgagcagcagccgaatgatttggaacagtttagccaaagttatcttgacttttctggcttgttttcttcattcatttggcttgatcccccaatttctagagtcatagatctgactctacctgtagactttgcagaactctgaggtagaaggtgcctagagactgcccagccctgccagggaggtgaagtcaggcagtgcctccagctgtcagcacccacacctcagccaagcccctggctcctcatgcaatctctccacggcctctgcctctgaatacctgcttccactaatcctgaactggctcctaggcccttagtgaggaagtgacagagagtggtttcagcccagaaacaactcaattcagcaaacatgattccatgcacatctgcactggactccgggcaccaagaggaacaagatgcaggaactgtgctggaggagggtttttgtttgtttgttttgttttataactaggccttagagactgaatagacgagtttacagctgcattaaaagcttggcaattatggagtagcaatgaaatcaatgaattatttgcaagagtcagagacagcacagaggtattattggcactctcttggcgtgtcaggaaaggcttttttggcagaggtagtatctgaacaaactttgggaggacaaatgggagtttacctacagaagggcagggtttggggccactttctaggcaaggtctcctaactctgtgatttcaaaggtaagcatagctcagttggtgtctgtagagcagtgttttataaacgtcaaagactgcatgagaattaatttgtgtggggaaagatgagagcagcggaaatctgcactttttaataaatgccttggatagttctgatgcccgcagcctgtcctctcctgagcttatgctcctgaaaccctcaggaaaggagtggagcccgaggttggggggtgggagacagcgtggcacacaaccagaaacccacaccggaatttccacatggcgccactgggcattggaaagatgcacatcccaaatatttctgtgtaactgaagtggctggcttttgcatgagggaggaaccaggatgcagttgttatctgctctgccttaaattcctgccttgcaagcaagtattaaaatacagctacttatcaattttttttttttaaccagcctgcccttccccttgggtgctctgccaggagcaaattgagtgtgaaacttggtgtccttattcactttctcatccctcccttgctcctctcacccacctgggaccatcttcccacactccttcccttgccttctccttggtgagttctaaccgatcatgaaggcctgttcaaaaagactccctggatcctggagatcatttttatgatgcccttttaaaaataattataaaaaaattcaaaatacatacagaaataaaaatcatttctgatcttattcacatatcttcaacacttggtagttttccattcatcttttctctctgagttattgttatttacagaattgggatgatacattttccaaggcatgagtagaagacggagcatataatagacacatcccactttttcccacacctcgaaaccaatcacttcaccattagttttagtcatgtgttttttactaaacattatatcatgagcattctccctatgtcattaaaaaatcttcaaaaataagatcatttcaaatacgtcgtaagtgcatcatattctcttatatggaatggaacctatgtaaagtcaggttacataaaatggaatctactgttaacctgtttcccttttttaaccccagctgcctggattcaaatcccactctgcttaattactcactgtaagaccttctcaagtcacttaacttccctgaacctcagtttccagagttgttgaatggggaataataatcatttctgtcttttagggtgttgtaaggattaaataagttaatatatgcaataacacaggactcaactttctgtgttaacactgtgttagctatgatcatccaacttacatatattttctaattatagaagtaatgagtaattgacatgatagaaaataaaaacattatagaaataagtaacataaaacttagtttgtatgcactatatatataacacatacaccaaactgttaatggtggatatctaagaaaatagaattattgtagactttctccaatgttttatgtataattttttaatgaacagctttatcatacatctacatatatacacataggtttttttctttttccttttttatttccataggtttttggggaacaggtggtattcggttacataagttctttagtggcaatttgtgagattttgttgcacccatctcctgagcagtataccctgaacccaatttgtagtcttttatccctcacccccttcccaccttttctctctgagtccccaaagtccattgcgtcattcttatgcctttgcattctcatagcttagccttgacttatgagtgtgaacacacaatgtttggtcatactgattttcttatttcatgatatctcttagacatctctccatgtaagtactagattgattttgcttgtcctttttgacagctgtttgatatcccattccatggctctgccaccatttatctgccaattcccttattgatgaacttttgctccaacatttttgctgttacaaacaatgccttggtggacacctttagatatacatgtatgtgcacttacgtgagtttttccatgggagaaattccctgatgtggacttactggctcagtgagtatgtagatttttacaagtttttatattcattgccaaattgctttccacaaggtcatagcaatttaaactcccaccagtggggtatgacagtgcttgttttcccacctggaaatgagcaccacaacgagtatcaccgtatgctttaatctctgtcagtctaataggtgtcatctatgtatctctgtcatgttatctctttgtcattttaattttcttttcatagtactgaggttaaaactattttcatatgtttggtggttatttgtatttcttataaaaattgcctgctcgttgctatttatgggcatgtttttctttttctatttcttattttttcatcacttagttcaaggaaagtatgctttctcttatcaatttgtaagtacattacaatattgatacagtaaatctctatctagcatgtatgttggatatattttctctgctttattgatttttttcaatcatttgtctcactttgccttcaaattggataatttctagtcatctatcttcaaatttattgactctttcctctgtcatctctatcctgctattaagtttatttatcatttaatttcagatatttgtgctttttccagttaaaatttttccatttggttctttttttcatattttctatttctctgcccaaagtttatctcttttcattagttatgagcatattttcctttatttcgttgagcctcgctctagtagctgctttagtctttgtctgacaattccaacatctggattattttatggtgggtttctgtggattatcttttcccttgaggataaaccacattttcctggttctttgtttgttgagtgattttggctcataccccagacgctggatgtgtctgaattctgttctcttgttttggctgcctatcttgggtcactcaacatgcaaactgtctcccttgcagtaggcagtggctctgctctcagttcagggcttttatctccagctgaacagctcatggtctgcctcatccatgcatgattgagggtcacctagaggtttgggcagcttccttgactcttttcagaattcccccctcactctccagcaacccaggttggttcaggctctgctcctggttcctcagatcagaaagctgtgggctgcctgtcgagttcttgctccatgtactttaccccaactgtggcctttccttagagcaaactcataaaaagtgcagcttcctctacgttctgattcctctctaaaatcatagtgctttgatcatgctcaggtgtctttcctagtttttcatttttttccccacagtttatcattatatgcaaaaggattcatctgttttgagcttatcctccacaccagaaacagaactacaggtttgtttgtttacatgtaacttcaatatttttacatactcaaatatatgagtctcttcctttatgctttctgaaatgggtggtctgcttagaactatcttttccacctcatgagtatagaaatatttttttccacgttgactagaacttggatttatgtcgaacttatattttcttcatgttgaactgaaaagtgccaagaccagtgtgactgtagtttccatgggagtggagaggagagaagagggcagaattgggggacagaatgagtaagaccttggctacctggctgtgcccggtgaggggtgagtggtgactgaggcttactaattgagacataagacaaagaacatttgaggactggcaggtgtcattcttcagttcagatcccagccaagagacggtgtggctcttagataagtcagccactcctgcagcaaccccattcattttcggccaacaccaagcacagaagcataccccgccaggcagagggagaaagctgtgtgggtttgcccctgggtggctggctccaatctggattcgttctgctccttagaaaggtgcatgctggtcaaggctttgacttttgagttaggcatacatgggtccacattttgaccctgccattgttagatgcttaacttctctgagcccaagtttccctttttataaaacgggcataaaaatggtacctattgcacagtgctgtgaggatttccacgagacgatgctcaccagggcttagcataaccgccgtcacagggcaaactcactcgatgcatgttgtcatgctgcactgttggggcaaagatgtgctgtcttgccactcatctgctgtgtggtcttgggcaagcgctgcagtctctggttctatctgcaggaatttccatgtctggaatgaaggctggtttgtgaggtctgacctgggcccctcgtacggtggatggcaggtgttggatgctaccccgcaggaaagaagccaaggtaacttctctgggtgtggttctgagtcgtgagcctcacagttatttacagccatggacagcagcatagggaagtaactccaaagccctctccctctggaatgcatgatgggattaaaacaaaaatagtttaaaaatagatctcccctgctaattttgcttggctcgggctgctgtttaaatgagtgcctgccctgcacccacaatggccactgttgctgcacagagccttggcacaggccaggtgggcagagagagcagccttcctctgccagtaatgattttccttcaccaactgcagcagcctctccttcccagcacagaaaattcatggttccctgttgcccttggggtttagtccacattctccactggtcaccacccacagcagctctctctgccacaccaagctcccccttaggcaggctgcctctgccatccctatcccgggcctctgcttcctcctctggcctccctctgtctcctgccccatcaggggttgggtcccaggctctcctggagcctttcctcttcccttctctgacctctagagcatgacttgtctgttaccctcattttcagttgttctttgaaacattaaaaagtgatttatggggctgggagtggtggctcacacctgtaatctcagcactttgggaggccaaggagggtggatctgttgagatcaggagttcaagaccagcctgaccaacatggtgaaaccccgtctctagtaaaaatacaaaattagtcgggcatgatagtacatgccttaatcccagctacttgggaggctgaggtgggagaatcgctggaactcaggaaacggaggtaaagccgtgagccgagatcatgccgtggcactccggcctgggagacagagcaagactccgtctaaaaaaaaaaaatgtgatatatgaagtaatatgtgcatgtagttgaaaaaaattcaaactattctaaaaggactaacaataaaacttaagtcttaccacacccccaacccctagctcctctaccagaatcagtgcacgttactagatttgggggcttggaggtaactgagacatttgctaggccacaattttccaaaagtttcattgcaacccattagtggttataaaatctagttagtgggctgtgtccatcattttaggaaaagaaaatgaaatggaatggaacggaaagcagggaaaagaacataaactatcaaggctcattagatatagttagactaggctgggcgcagtggctcacgcctgtaatcccagcactttgggaggccgaggtgggtggatcacgaggtcaggagatcgagaccatcctggctaacatggtgaaaccccgtctctactaaaattacaaaaaaaaaaaattagccgggcgtggtggcgggcgcctgtagtcccagctactgagagaggctgaggcaggagaatggcgtgaacccgggaggcggagcttgcaatgagtcgagattgcaccactgcactccagactgggcgacagagcacgactgcatctcaaaaaaacaaacaaacaaacaaaaaagatatagttagactaaagaccattgtcctgtgaaacttttgtttctgtatcatatgtgtgccaagatgtcaaatgtatttctttctaggggttgtggtgaaaaaagctgaaagtcactgacatctatctatctatctatctaagcttcctatgctgagtgctaagaagagggaagaaatggtcaggcttgggagctcagaggaacaagaggtccctgcaggctgcctgttcagggaagtcttcctggactaggaaggtgatgagcttctaggccagaatgacttgcagaggtagaaaagaggcagccaccctgagcacgagaaagcaagactttcctctttaggaaacagaccaaggacagtgggtcagcatggattaggcgcccggaatgcggaattgtgtagtcttatgtagaggttgagttcgaccagcaagagaatcatagcccgggagggtctctgcagaatgccaaatgagtgggacacacagtcaggggtgaaggaatttgggcggggcagaggcagggggttgcagtggtcctggaaggccctggggaatcgggcactgggtaggttgtggccttggcatatatccagcctctgcatcttggcctccaggggtgttccagtgcggccccgcttcggtcattggtgttcgagagggtgatgtgcagctgaacttcgacatgccctttatcttcgcggaggttaatgccgaccgcatcacctggctgtacgacaacaccactggcaaacagtggaagaattccgtgaacagtcacaccattggcaggtacatcagcaccaaggcggtgggcagcaatgctcgcatggacgtcacggacaagtacaagtacccagaaggtaggagggacgctggcggggcagtgccgcgagaggttctattgtgggaggatggctctgaggctggagaggagaaaagtcctcacctcccccgcactggcagccagttctgcctgaatgataggattgctccctagcacctaacatccacctcccaggactgtttccggagggaacaaaaccatcacgggcagctgttgtgccagtggaagtttgctgcagggcacaggtggctgtcaacccagcccatctccagctgtgtccctgtctcaactacacagctagggtgacagcaccgtgactgaacatcacagggagagacatggcccccatgaaaggcccccaagggctttgggagagatttctccatcagtctgctcccttagcctctgagaaactcagggagaaaaccatctgaacgaagaaagggacaaagaaacccagagacctgagcttgcactgtgcacatttggaggtctcccaagaagccagatgaggtgtgattacatggtgtgaatgcctgagctcctgaaatctcaggcatgctacattgctcgtccccctgaagtcaccttggaaagccagttgctgcgaggctgcctcgactcaattatattcactgcccagagtttcttttgaaaccagcagcgcatctcttggagcattctcaatgatgataaaagttctgcatttgaagacaaagttcatttttagaaacagccaaaagtaatttagtgcttgctcttgcaggccacagtcactcctaaatggggtcaacatttcacactttctaaaatgctttgaaattgctcattccattgatcttcacagttggttctgaggggtcaagaaaagcatcctcataaaggtgcacacagtacccacaaagtaagccctgaatctctaagtgacggttggctaatggtgttggccgagtttacaaaaaaggaaagctgagcgcaggtgatggggtctgacttcaagtccaagtgggtgcccccccaggtgctggtatttgtgaacatttggaggcacagttttagggttatgagattggtggcctcaatttggccccagtcttcctctgcaggtcattcccaggactgagctcagatagacctttgctcagtcaataaacatattctgagccccatactgagtgcctgcttcatgctgggccttggggatgcaacagaggacactgcagatgggctggaggtgtggggatgtaggacaagtattttcaacaatgttatgacgtagaaacaagcatagggggtcagggagcaaaaactcgggggcggaaggtgaactctagccctaccagccataattgtgtgacctcgagcaagtttcctctgatctctgagccctcgcttcctcacccgaagaatgagaagagcaatgcctgtcttcagcgggatttaaatgagctaaggtatacaaagtgccaagtgcaatgcctggcatatagtcaagacttgataaatagcagtggtgatctttatcaatttgaacctctatagcctcactggaacaatgacttcccaaggtgactattttgcaggcgctgcttacatgactgtacgatcctgtggggttccttaccttaccccacaccttgatctctggctgtctcagccaaacttcctaaacaatggagaatgggcaggtccgttgtgggggtgggggagggggtccctgaaggactcccagcaatgccccagcccttatgcgacaggacagatcaccctgcctgatgttgcccagatcttcttacctaatgactctagcttctctctgagggccccagagaggaaaagctcataaaatatgttgctaagtattgatgcaatagcaacagcaaagggagaaaacagcaggaggaagcttagtcttgagtaaacccagcaggtgacctatataggcatcaaggctccaagcctcattgtgcaaacacacctgcttcaaggtcccaggcacagaaggctcagatccgtgcactgccttcagctctgggttgaacttacagctggactagaggatgggaaggcatcaaaaggaacccagcccaccaggaactaccagcttaggtaatctggctgcctgccttctttttagcagggtgtgtgggaggaaacttagaccaggggtccagacaccagggaactggccccctctctgcctctgcagatgactggcccagtccatctcagagtggtctggacaagttgtgtctcttcttagggccttaacttgataggcatggacgagttggcctctgaagtctctgcaaatcacatgtaatttatgggaaggggcttgctgtatcgtaaaatgcttacaataagtcatctgggccaggtgaagtggctcatgcctgtaatcccagcactttgagaggccaaggtgagcagatcacctgaggtcaggagtttgagaccagcctggccaacatggtgaaaccctgtctctaccaaaaaggcaaaaattagctgggcttggtggcgggcacctgtaatcccagctactcgggaggctgaagcaggagaacctcttgaacccaggaggtggatgttgcagtgagttgagatcatgccactgcactccagcttgggtgacagagtgagaccctgtcacaaaaaaaaaaaaaaaaaaaaaagagagagaaaaaaaataaaaaaagaaaagaaagtcatccagtgccttaagcatttcacaggttgttggggaaggtgggagaatgtaagtgtggtctgcagacgtcaacatggtcactcttccttgtgtacctgtgttcctggaaggtcaacaccttctcctagatctatcttcaggtcaagccttttgtgaactgctcagtcagccctggctcagaggcttgcagtcggttactcagctctgtgtgccctcagagccattttcaggtacatccctgtcattctctgtgggctacttacgccatcacactcagcagcacccatagcctgagtcagagtcagaaaacccatctttttatccagtctttgcagttttgaaaactgaaatctctggacaatttcaactagtcataacttggaaccacaccgaccatgggaagtccttgtcaaccggcacagatcaaaatgtcactccttgactctcaaagcacctttagaaacaaggcagaagaacatggtttaccaaaaaaaattttttaattaagtcagttctaaatcatcaccttgctttttggcttatgaatgtattctaatctttttcagctcagttcttatgatttattttgaaattatctgttttttaagtctcacaaaagacattttatcagaaaaaaatggaatctaacctaattaacgcaagcaaatgatcaagccacatagtaattgtgtgcaggtgtgataaagcttttctacagattttgggaaatttagagctgattagaaaagcgccagagaccaactggtctgtgagtctccggttaagacaggcgagctggagacctgtgaaagtcgaatgcctgctagggcagcaatggagccagcaccagtcctaggccgcctgtccaggcagggtactgtcctttgcccaggttgccatcacatccctggcatgtttctgtcttttcccaccacacaggctctgaccaggaaagacaagtgttccaaaaggctttggggaaacttaaacccaacacgccatttgccgcgacgtcttcaatgggtttggaaacagaggaacaggagcccagcatcatcgggaagctgaaggtcgctggcatgctggcagtaggcaaagaagtcaacctggtcctactgctcaaaaacctgagcagggatacgaagacagtgacagtgaacatgacagcctggaccatcatctacaacggcacgcttgtacatgaagtgtggaaggactctgccacaatgtccctggaccctgaggaaggtaacgcatcccgcagttggaggagatccacgaatccgaggtagccaatggccttctggggctgcagggtgtctgctgggctccaggttagtcagctacgaatggagcagccagcggcccctgtggttaagccatgtattaatgctttggaagtttctgtctctatgaacagagtgatgccaaccaaatgtcagggtggtgccaaccaaaatccttttacgccccaagggaggaaggagggaggctttggcagttcatagctatggcacaatatcccttacaagtatataccacctcacacagtttgaccgtctaaaaaaaggcagattttcagtgtccatcttatagaagcagaaagtgaggctgggagagatttgtgacttgcttcggagataaagtatcatagatagtagtggtagtgctgagtcttggtcctaggtttcctgatactgagtccagagccaccccctgttttctatgttgtattgttcttacccacctcacccccactcccacaacaaatcgcttttcaaatttgacctcaggagggtggcaatgaccacgggaccctaaaccttggcccatggccctcccacagctgccacggggtgggtggaccttctggaatcctgacaacagtgacaggttttcttagaagtctgagcgtttgggaggaacagtgactccttgcccttgggtagcagggatgggaagggaacaaggtggagcagataaaggttgtgctgtggaaggattagaatgcaggtgtgcccacattggtaaaatccttcaagctgtcatgaaaagtttggacttacaagccggattaacagggcagggtggttatttgcttcacataaggaactaatagaaactgattaattatactgcccatcttgaaagaattctgtctccagagaaactgagaggtgtcacacctgtcagaaagaagcatcccctagcaatctgtcttctggcagaattttagcagaaatcttttcaatatatgaagcaactgcctggctgttattgaccttagaaactcaaagaaagggctttttttgtttgtttgtttgtttttgtttatttgttttgtttttagacaggatcttgctctgtctgccaggctgaagtgatcatagctcactgcagcctcaaactctgggctcaagcaatcctcctgcctcagccccccaagtagctgtagtcccaagtaactaggactacaggcatgccattatgcccagctaacttttaaagttttttgtagagatagggtctcactatgttgcccaggctagtctcaaactcctggcctcaagcaattttcccgccttggcttcccaaagtgctgggattacaggcataagccaccatgcctggccaaaagagctaattttggaaatcaaaaaaaattcacaggatggaaatagttaaaaaaaaaccgttttgcagaatggaatggaaaagagagagaaggcaggtgtagtggtcttagagtctggtcgtctgccaagtagttgctagatgaccctggttaagtctccctccctttctgaacctcggaggtcactgacggtgagggttggaccagctgatgcaagggcctgtcctctccacatttggggcagggatggcaaattccttcagtgctaaaagcagaggcagcttcctcctcacagtcttacctacaagagtatgtaatactgtgggtgctggggcatccccaggccacccagcatgacagcctgagggaagggagcacctaagcccatcagggtagggaaagggccccgcggcccacagggtcagaagagaggacttaaagcgtggggaaggagccggatgcatggagagaagccaggggaggcatttccatctgggggaaccatgtgagtcaaaatatgggggcgaaaaggtgcctgttttgtctgcagaacaagaagtgtggaaggttcttttaagggacaggtgatgcagggccaggttgaggggtctgaactttatctaaggcaatgaggagccacggaagatttttgaagtcacatgtgacacagaagaagagtgatttagaaaacaaaacagaacaaaacgaaaaacagctttccaaagctttgtctggctggtgtgtggatgatttagaagaactagagaccagaccagaggaatgaaggggatgctgtggcagtagaaccccaggctattagatgacggggaggatcctaagcgtttgtttagccaataccctggcttcccttcctacctattattgtgttactgtcatgattgctactgttgttggcaatcaggtggcatttgtattcttccactgcccctcagaaggacacttgtggctgggagcagtgctcacgcctgtaatcccaacactttgggaggccaaggcgggaggatcccttgagtccaggagtttgagaccagcctggacaacatagagagaccccatctctacaaataatttaaaaaattttaaaaaaaaaggacacttgccctccaacatttttcggagtcgggaggaagcagcggtatctttagcccctgtgagcccatcctcctgggaatctgcccagccagagagagtcctggggcctctttgccccctgctctggagcccaccctgaccgggggacgcttcccacaggacctggcccaaggagggctcagtcaagcccggggctgcagatcctcccaccagctcaccctgccttggcttggcatctgttctgaggaaggttcagaagccatccccactccccctcactcggatcccctggcttctccttccagaggcagaacatcccataaagatctcgtacgctcagtatgagaagtacctgaagtcagacaacatgatccggatcacagcggtgtgcaaggtcccagatgagtctgaggtggtggtggagcgggacatcatcctggacaaccccaccttgaccctggaggtaatggggctccccatcctgtgggaaggggttctgcccccagccagcccagctcccaggagccccactgtccctgtgagccacagctctcccagagggcaaaggagagttttttcttgctgggaggggcagagaactgggcccagcttcggtccagcctctgccaaatagccaagagctcccactcaggcccgtgttcctgctccctgtctggtgagataaacgcgtgcatttgcctggctgcttctcagattctagttcagaaccactgggggcatcagctgaggaggggcctgggggactcttttcagctcattcccttctcactcagctactgagcatttgctgtgttctgggccatgccaggcttgagatctgctgtgttctgggccatgccaggcttgagaatcacagacaggcacaggtgtaggtctcacacacagccagctgatgtgccagggccacagcccagccctctgtcatggacagatcagaaataggcctgacccacagcatctctcccctgtctagaccctggagttacagaattgtggactcttaggagcctagtcacatgctcctgtactctcatttcacacaagtaaaccaaggcccagagagaagggaacagctggccaccgccagagtcaaggctaggcctcagaacctgggactcccagcccatgcccctccaaggcgtcctggtacatcaccagccagcaacagcatcttcaaagtggctgagaacaaagacccctctttctctgctcatagggcttcctttactttgcagcattcactcccaggctccttctcaggagcccaggaaggtggggcttgcaggtctgtgggaggcccctcgtgccactctgtgtcttcctcagcactggtaggagcacctgtgcggactccaagcctgtccctcaccctgtagcccctgtgcctgatccccacagcccagggtgaagggtgctggaaccagggagtataggtctgaagggtaaaaggctggacaaggacaggcagacaaacggacagagaacatgaggttttcccttggggcccaatcaagagcctcatgggccaggccctgccctctctcatctgctgtacccaccgtctgccccagttgtctagatagaaattgcctttccctgtacaatcacaatgccacaggtttcccaagccccagaaaccaggaagagccagataatcatggctgccctggcccgcccctccttaagctgtaagctggctgcaggcgttcctgacctcagaaagggcagggggatctaggatgctggctctgatgccgggcctggttctcccacatagctggcctgcaattgcacccttttactgtcctggttagtttggactgtgcttcaggatgggggagttggtcccctaccttaggggctagagagtcagtgactgggcagccagtctgggggctgagaagggcagtcgttcaggccttgggccatgtaaccaaatggatctggcattgtatctaaacccctccattgatcagtggtgacactgagcaggtcccttaatctgagtctcagttgctccaactctgtcactgggacaataaattacttcccttgcagagtgtcatttcctcagggaagcctttcctgagctcccaaattaggctcccaaattcatctcaattatacaccctcagaacattctgtccttttccttcaaggcatttgtcccagctggaatattatccttctttgtgcaattatttggttgtgaatccctacccaaccgtaaactccatgagggcaggcattacctctgttctgagttcatcactgtctcccttagcacaatgtcttagtggatagccactatttgtaaaagagaaatagccccttgctcggggcatgactggaacagatccccttggctctggacttgcattcttccctgcacaggaaagtcagtccaggcttgtgccctgcgtgtgacagcctctcctgcttcacaagacatttctgagaaacactccccatctctctagacatggtggacagcagagtgcccattccaactcctgaggctagaaaatgatactgggtggctgccagttcagttatgagaacattctgtactaaagtgatcagtgtttaaaagaacttagtttttggccaggcgcggtggctcactcttgcaatcccagcactttgggaagccgaggcaggtggagcacctgaggtcaggagttcaagaccagcctggccaacatggtgaaaccccgtctctactaaaaatagaaaaaattagccaggcatggtggcgggcacctataatcccagctacttgggaggctgaggcaggagaattgcttgaacccgagaggcagcggttgcagtgagccgagatcacaccactgcactccagcctggctgacagagtgagactccgtcaaaaaaaaaaaaaattagtgtttttccccagtgtattccccattatgttcccttatccaatgtcctcaaaccttcttccagcattatcttttattcaacacttttgctatacatcttccagatttccatggcaagtctacttatctttaagatactacaatatctttagaaaggaaatcagaatatataaggctagaaatgtgccatcactgactctttttaaaaatttaatctttttaaatgactcctgatcttccttcttcgaggcaagttctttcctccacctaagccttcacctaatcgagacattcttgtctctattgaacggatcaatgcctagctcactcagagcagggcaccgatttttaaactggagaaggtgatctgtatgaaaagataataatttgggtaaaaccccattatctaacctggtactgactggcaattagcactgaggaccttagaccacaaaaccaggccaaaaacaatctgaacattgtttccaaagggtgatgtcctcccaattgatccatcatctgtgacaagcaaactcaggtttttagtggcttttatcctttcctctgggtacatttacagagttgggtcaataggagagagtggtaagcggcattaaaaaaagaaaaaaaagcatggaaatctcaaattaaatatcaccatgaaaaatgtggcaacatctgtatagctttcttataacccaatagcataaaattatgctgcactcttcaaattatgtcatacacttaaatgagtttcatggaagaaatgaaaatatagaccatgatgtgtaaaatgcttcaattactcacaaattactgggaggtattgcagacctatcagaaacagcaaaggctttagatccagctgggctctgctgtttccttgtgtgtgaatgttccaggttattgaatcagcctgaacctcagctctgtcactgtaaaatggttgctctgaggattagtgacaagaaaaacaaaacacagcaacaacaaaacccagcaacctccggtcatcctcaaaagaagaagaaatccaatagccataaaatgtccatttctatgtccaaaatgctttcttccccatccttgatctcatttgaccccttctgggagggaagagatgattgtccttctttaccagatgaggaagttgaggcgcaaagagatgacttgtctgcccagaatgaattacggctgtttcttggcagaaacacaacagctttcatcttttggtctgaataaatagtccaaattgcttttctgaccccaaacccagccttcatctgttctgatcactgagcaaggaccgtgtggtattagagctccgctcagactataaatggtgcacagggaacctctgggctctagaagtttagaaggacattggtagactggggtgtcagcagaggagagtagcctgggttgagctggggggacccaacccctggaaaaagagttaagggagctacagtgtgagccagggtgtgagcagctgtggggcctggggctgcccttttcaacacctgtggggcctcccagagacggaggttcaagctttaagggaagaaacaggacccataagcaggaaagccaaggaaagtaatattaaacccagcaagtggctgggcacagtgacttacatctgtaatcccagtgctttgggaggccaaggcaggaagatcacttgaggccaggagttcgaggccagcctgggcaacacagcaagaccctgtccttgcaaaaaataaattcagcatgaaaaatgtcctgaccctcacagagcccacagtggggttgggctgtcctgggaagcagggtctgaactggagtcggggcagggaagtaacagtgttgttggctgctgcagggggccccttccccctcaaagctgaggttctcatccacagcacaggataatgtcctgggaccatcctgtgtattggggggcagggggcgtcagacacaatgtgcctggcacctaggagggctaaatggtctccccttcttcatcctcagtgacatcacccccttcactcagtcaccctgcccagccctcaccaaggtgcaggcaggggctgagcagctggagtcctgactcggcagcccctctcccccataggtgctgaacgaggctcgtgtgcggaagcctgtgaacgtgcagatgctcttctccaatccactggatgagccggtgagggactgcgtgctgatggtggagggaagcggcctgctgttgggtaacctgaagatcgagtgagtcctgggcctaagtggccggtgcaggagggcgggagggggcgggggggccctccagatcccctgggtgggacagacagagctccctctgaccttgggttctttactcttttgggggtcttggaactctagaatctgcttttgcatttggtttgggggttcaccaaacttgaactcctgagaagaacaggtcaccagagctaagagctggccttcagggcttagaatatttgggagatcatgggacccccccctcctgcttcccctgctgaagagttccagggctggaggggccccgtaacccagagagacagctagagggagctaaagaagcagtggccttgcccagcctccatcagaacaggacaggaggtcacaggaggcccgtccagcccaaggtccgtgtgtctcgtatcaacactgatctgtgccctccccatcagcgtgccgaccctagggcccaaggaggggtcccgggtccgttttgatatcctgccctcccggagtggcaccaagcaactgctcgccgacttctcctgcaacaagttccctgcaatcaaggccatgttgtccatcgatgtagccgaatgaagggcgctggtggcctcccgtacaaacttggacaacacggagcagggagagctcaccatggaatgaaccccccgcccatgctgtccggcctgggaaaccctctccatctcccaaggctgccagacatggacctccaggctccagcacatccccctctcctctcccccaggttggggctgggtccaccctgtcctatgacttgatcacttttgcacattccctggccgcttctccccagagctgcctgctctgtgagccccacagccctgctcattcctcacgcccttcaatgctgcaggatggactggcccctgacccagggactctccaaacgggatacaggagagaagctggtctagactgtttgctgatccccaacctgcacggggcattcctgcttctctctcaggccaccacagagggcaggggatggttagtcacctgccccagcactcacaccctaactcaaaataaatgttaaataagtgcgatcacacagcaccgactctacctgactgctgttgcacctaaggtggtgaaggagagaggaggctgtggccgtgaccttctggagcagggaataaatttgaggaggccatgttctctgtgtttcaatgtccaaagggagtgggcttgatctgcaaggctgtagatgcaaaactagggaaacatttcaagccagtttaggaaaactttctaacatgatgtccaaaaatagatgaggctgccttgggaggtagctcctggtcacagaaggcttcaaacattctctgtgtggttgggcaaacttttcaggcctctctacatgcatcagagtgagaggggacgtcacagtttttgctggaaccctctggcagagctggtcccgggggtggcccagcctctgctcacatggggctccacgctcctcttgtggccaggagcaaatgcgtccttccgccagccacagcgctgttaactcaacctgaaccttctctgcctttatacacactctgatggttcctcagcctttgtcccttaaaataacctcaaacaaatcccattagctttcctgtcgcttgtgctgactaatcccattttgacaactctgcctcattttctgaactcaggagacaagtagaatctaaatagaaacctcaacctcacatccagctcaaagcttctcccctgggtgcagcgcaggccttacttacgcctgcagagcaggcactgtccatctctcaccttccttcccttccttccccgaactggggagttgctagatccctcagagttggagcagagagagaagaagaaaagtgacagttgtctgtatcactggtgctgatgtaatgcagccaatgatggtctctgtgtcgccagtgtttaaatgcaggctttctgtactgcttgttgcctgagcccaggagttcaaggctgcagtgagctatgattgtgtcactgtacttcagcttgaatgacacaataagaccccatctcttaaaaaaaaaaaaaagcggtcagtaaattagggatttggggttgaatcacttaccatccagctgccttgaacccatcctcatcccatattatcccaggcaatatggattgggtacatctgggtggatgccctcaaacgttttgacttccaaactcctctggaccctcagagcccatagacaggcctggcctccttcctattaagatccagtaacttctctccccacctcctatcccatatgggaagacactgaagaattctctctcctgcagcaggggccctactcaggatttatttctgcctcttctcttggcctccaggctgatgtcatgttaagttgcagtgtaactcagttggggatgtgccatatctgataaagaaataaagagactatagtccaaaggatccgaaaaactaggatcatgtgacagcaggatcacgggagaactctgggagtggatttgagggtgcttaatcaaggaagccataacaggagcctaaacaatgaagaatttattgacttggggccattcttttgtgatacgagatttaatacccaggtgaggatcctgagagctggtgcaaactggcttagtggctccaaacatctggaagaagtgatgacttacgctaagtacagttgaaatggctgaattcctatgctgcatgatagaggaaagaattaaaaggctcagggaaatgggcgtgctggggttgacatattatgaggggccaggagacatcttccaaaggattgtgttccctcagagggcccaggggacccacccaccattcaccaaggccatcagaaatgagtagtgacagaggcatcaacatcactaagaaattcagtggtggcatcctctacatttaaagcaaaaataatagcaacattgtagaagtaaaatgtatgaaaataataacacaatggccaggaaggaaaaaaaaacactgatgtaaatttcttatataatacatgaagtaataaaatattaattgaagatagactgtgacaagttaaagatctgtattataaacctaaagaaaccagtaaaagaaaagaaggccggcgtggtggctcacacctgcaatctcagtactttgggaggccaagatgggtagatcacttgaggccaagagttcaagaccagcctggccaatatggtgaaaccccatttctactttaaaaaaaaaaaaattatccaggcgtggtggcacatgcctgtagtcccagctactcaggagactgaggcaggggagttacttgaacttgagaggcagaagttgcagtgagccgagatggtgccactgcacttcagcctggttgacagagtgaaaccctgtttcaaaaaagaaagagaagaaaaagaaaagaaaacaagctggccatggtggctcacgcctgtaatcccagaacttcaggagtctgaagcaggcaggtcacctgaggtcaggagtttgagaccagcctggccaacatgtcaaaaccccgtctctactaaaaatacagaaattagctgggtgtggtggtgcatacctgtaatcccaactacttgggaggctgaggcaggaaaatctcttgaccctgggaggtggaggctgcagtgagctgagatcgcaccactgcactccatcctggacaacagagtgagactccatctaaaaaaaaaagaaaacaacaagaaaacccagttatcagtaacaaaccaacaaagtaaacgcaatgtaatagtaaagaatactcaattaatagaaaaagaaggcagaaaaggagaaaagggaacaaagaatagttgagacagattttaaaaataagtagcaatatggtagattaaacccaaccatactaataatcacattaaatgtaaatggcccaaacacccaaataaaaggcagctattgtcagattgggtaaaaaagcaagacccaactatatactgctacaaaaaatcaaatttgaatatagaatagaaattggttaaatgtaaaagaatacaaattatataccatacaaatagtaaccataacaaacctggagtggctatacaaatattaaacaaaatagccaaagattgttactaaagaaaaagaatatttttgaatgataaaagaatcaatccatcaagaataaaaattataagtagtctcaatgttctttgaatgcaaagaaattaaattagatgacaataacataaatatatctggaaatctccaaacatttggaaactaaagaaaagacttctgaataacctatgggtcaaaggagaaatttttaaagagaattataaagtattttaaactaaaaacacagcatataaaaatgcataggatgcagcagaggaatatttatagcactaaaatgtctatattagaaacgaaaaaaatcaatgaactcaccttccaccttaggcagccaaaaagtgaagaaattaaaccaggccgggcgcggcggctcacgcctgtaatcccagcactttgaaaggccaaggcccatggattacctgaggtcgggagatcgagaccagcctgagcaacatggagaaaccccgtctctattaaaactaaaaaattagctgggcgtggtggcaggcacctgtaataccagctactcaggaggctgaagcaggagaatctcttgaacctgggaggcagaggttgtggtgagcaaagattgcgccattgcactccagcctgggcaacaagagcaaaactccgtctcataaaaaaagaaagaaatgaagaaattaaacctaaaatctaaaataaatggaaaaggaaataccaaacagcataaatcaataaaacagaaaatagaaaaacaaaatagtaattcaatgtaactaaaagtgggttctttcggaacatgaataacattgataagtctctagccagactgatcagcaaaaaataagaaagacacaaattactaatatcaggaataagagaccctatagctatttgaagaataatttagaaatattatggacaaacttatgcataaaaagcttgacaacttagctgggcatggtggctcatgcctgtagtcttgggaggccaaggctggaggatcacttgagctcaggagttcaagaccagcctgggcaacatggcaagaccttgtctgtatcaaaaaaaatagccaggcacggtggcacacacctgtagtcccagctattcagaaggctgaggtgagaggatggtttgagcccaggaggcagaagttgcagtgagccaagattgggccattgcactctaacctgggtaatagagccagaccctgtctcaaaaaaaaaaaaaaaaaaaaaaaaaaggttgacaacttagataaaatgaacaaattccttgaaagacacaaactatcaaaacccattgaggaagaaatagatatccaaagtatccctatatctattttaaaatttgagtttggagtgaagttcagtagaaaactctccagccgagcctaacacaaattgctggccatagaactggttgtcgtcttgtcaccacattttcatgtggtttgttatacagcataggatattatttattgttgtattatattaattatcaccacgaaaatatttattcactctccagtgctcagttcaaatgtttcctctcctgcaaaaccttccccatcttcctcccacatcactgcatccaaacacacgaggtctctttttttctctctatgctttcccttcattgtctttttggaccacttggcttaaagtcgtctggcctacgtctctcctcccctgtcctagactttgtgcttgtcatgggcaaaaaccatgtcttctttagccctacattctccacacttagcataatacctggtgtagataagcacccataagaattcataaaagagccaaaaagtaaatgaaattggtaatgaatgaatgaatgaagtgactgattgaattttaatatgtaatattcattgagagtataaaatatgctagtcacttttctaaggttatcataagtatttatttaatccttccaacaatcctttgaggaaagtactaatattattcccattttacaaatgaggaagcagagatttcgagagttacttagatcacaaaatagtaaatgacagagctgggactcatacccaggtagactggctctagtgcctaatctgtatgttatgcagtactacctacacaaattctaaagaggtatccagtgataaatcccatcacaggcttacaaagagatacagaggaaaaatgaagcagaaacaaggaagtgtgtctgtgctgtggtacccagccctagggaggcattcttggacgcctcctcccaatctcctttcctgcaactgcttagtttattggctctctcattcctatgctgatgagcatccctattcccagaagcagcctcttcacccgtcctacgtctggctctaaaccactcctcctcccaaccttgatcacacttgcctggggaagccagcctcaaagagctgaattcaacatatcccattacaatgaatgttagtaccagggactccccctgacattatgtcatttctcctcccagcaaccttcaaaggtggaattattacacactggtactggtggggaagctgaggcttagagcaaattctctacattccttgctctcatactagtcttcacatacctttataatcacttaccatactttattgcaatcatttgtttatgtgtcaatggttgccaatctgcaggtggaaacacaggtaaatatatataaaatgatgtattgatgtcacattacaatagattatatgttcagtgaccttaacatgatacgttcaatgtgttgtccctcctcagggcataattggttgtgctgtgcaaaactgcaatggaagtggagtgatacgcagcaactccatcattctcacagactgccttggatgatttgtgcctctgagtttcatggaataaacctgcagttttagtatgcctcagaagatgtaatcaaggcggttcaatctggaacaaaattaagtaatattacttatatagtcagactttctggccattctgtcgtaaatgtgctttctctattaaaaaaattaaaagtatatagatgcattaaactatttttatacaaatatattcacattataaaaattccttaaatatgtaagccggtaagagagtgaaaaaataggcagttcccccttccccactcctcttccactccttcccccagaggacatgcctgttgtcagtatgaagcatgccccttccggtatttcttaacccttaggaatgagagtagggcaccttctactggtagatgggggaattacaggtatttgtaaaatcatctgatggccagtgcttcagactgaaggaccagccttctgtttgtttgtttgtttttgagagggagtctcgctctgtcgcccaggctggagtgcagtggcgcgatctctgctcactacgagctccacttcccaggttcacgccattctcctgcctcagcctcccgagtagctgggactgcaggtgctcaccactgcgcccggctaattgaccagccttctgtttaatcatgaaatgcatgtaggggtagggaggataactctataaaaaggttttggtatcttatgtttgacactggcaatccccctcatctgattctgcaatatgtgacctcccaagggcaccaggccattaaattatatggtcaagatctcactgaatcacaggtgattaacgagtccctcctgtgaccaggttctggggattcagcacagatgattagtgctttctgaaggtttatcatcaagggggtgggaaggtgggcagtgggatggaagtgggggaaggtagggggagatagatgataagatggataatcaaataaaaaatataaattcaagtaatgattggtacactgatgaataaaagtcaggatgggggtatgtcgggggtgggatgggcagggcaggctctctgacggtggtatttgggtagaaatttggcatgaatgatgagggagagccatgtgaacatctgaaggagcaggttctggagcaggggagcaaagccatttgggagtacccctggtgtgtgtgaggaagataaaggaggcaatggtcctgcagtggaaaagtgagggtagggttaactggaggggaacacagatcctgtagagccctgaaagctgttataaggacttgggcttctattgtgattgagatgggaagcccaggaaggttttgagcaaagaagtgacaggatatgacttgtgttctaaagaaaaccctctggctgctgcggggagtccatggaggaggttgttgtaaccacccaggtaagagatgagggtggcgtggtccagtttggtagcgatgggtagctgggaagtggagaaggcagagcccacaagatgtgatgagggactggctatgggctgtgagggaaggaagcatgcaactaacaccagtgcttttccacctgagcaattcagggactccaggtgtcacagggcacagctctattgctcttcctccatgaggtgggccctagggagctgtgatgtgggaagctccttccttcctctccagtctcactctggcccctcttcggccacttctctgtgtctgactccctaatcactgtgctgcgatcctggcttcagtccagaatgccaaagctgcatcttctttgataacattccctggtgctcagagctccacaccagtcctggaaggaaaagcaggtttcagagggaaaagaagccctaaggcccagctgggaggctggagcaatcagggaggacttctcataagagctggccttgaagaacgttatgatttcctcaaattcaggcagggggagaaacatgagaaggaaagatgtgttaatgaaccagagtgacatgaggctgagaggcagatagaaaggaccgggaagagcctgacctcgactggctggaattaatcccaatttagtgggttacagcagtgccgggtgggtggggaggggggctgtaacaggtcatattttcccaaaatggccacagtagtatttctaattctatatgctctcctgtctcagtcaaaaggtggagtctaatttctcccttggaatatgggttgtctttgagactgccttgactgctagagttcagtggcagtgatcctatgtgacttctgatcaattataaaggccatatggcttctgcctctctctctctctctctctctctctctctctctctctctctctctctctctctctctccccacccgccccgacctccaccggcgctcacccttggaacctagccaccatgttatgaggaagtccagatcacatggaaatgccttatgtgggcattcagccaacaaatcagctaatcaaccaccaatcatgtgagtaaataagcctttaggtaacgtcagcaccagacactgagttatcctcagccctcaagtcttcaagctgcgacccagacagtgtggagaagaggcaagccatccccactgtgccctgtcggaaatgctcacccataagaataataaatgaatattcttcaccactacgtttagggatagtttgttatgcaacaacagcaactggaataagccccaacacaggtcagcctggtgaaaaactccctggtatcattaatgtgccccctattatctccagggttattagtgtctaactaggcattatgcacaagcatcagagccaaattacagtctatatctaattactattttattattattccctgttatgcttggctagtgggtgtttgttggggtggcgggcaccctccccagccagggcagggacaacccttgtgaccccgcttaagaatagggttttctcttcatgatgccttcttgtggtcaacgatggcaaaagaacaaaactggaatctccatatgactctgcaggaaggaatgtgacctgaagcaaggggcttatctgcccatctggtgactcccaggtcagccccatctcaaaacaagcccgcttcaaccattcatgtatccattcatctactcaacaacaacaattttgaacagctattgtgtgtcaggctctatgttatccacacaaggagacagtggtccatctctccatggagcttctatcctagtggggagccagaatgcaagtaatcgaacaaagtgctgacaggctgtgataagtgtgatgaaggaaagacacaggttttgttccaggaataataggcaacttttctctgagccccggggacgtttctgtggaattgtgtttcagctgagacctgaaggatccaagcctggtaagtccatctgtagcaatggacattcactggctgaatcgaggagaggagaaaatgttgaacggatatcaggaaactcacagaccagctggaaatattagggaatcaggcttagaaaacacgcaggcgcaaagagtgaccatgaagcccagcactacagccaaaactgcaccacaaagcccatcaggtaaggacatcattgcttgacctaagaataagatggcaggagaatccattctggccaccagggccatcaccattgcccccagaatggagtcctcaccatgccctcttcttgacaccagctcccaagtaaaaattccaggtgagaacatccgctaggctaagcctgtcatgtgaccatgccctcgctgcagcaaaatctgggaaagtaactatttagacaagatgcctggatctgcagcaaccacctggtggcaatgaagcaacaggcacagaaaacagccaagagtcaaggatagtgaaacacagacgttgaaggaatgaggccctttggcgccactgctgagctgctacaccagtcttgagactgtcaaattctggacactgtatgaactaaacaaataaagatctttaggattttaagccaccattgtcgaagatgctgttacttgcagagaaggcatttttaatcattacgaagaaaaacagatccacactcgaggagtttttatctaacgtgactggtagaatgtgctctaatggatgaggatgggcagggtggtaaggtttctcaaatttctgtgtgaatcaggatcaactggggctgcttattaaaatgcagattctcacaatccatccccaagctcactggctaagactcaacgaggaataagcatttttatggcatacagatgtgtctgatgcaggaggcccactgggcagacttggtgagcagaggcacagggggacccgggtcagctgcaatgtcttcctcttcctctccaagtcccagcttctcatctgcaaagctaaatgtgatcatggatgtcaaggccttaacagtgcctcggtgggcacagtcataatacaaataatatttattgtaccagaaggcctagggatcctggctctgccccttaactggctgtgtgactttggggaaattacttaaactctctgcacctcagtttcctcatttgtacaacacagataataatggtgctcacctcatagactcatgatgatgggtgagttactatatgttgaacacttagaatagcacctggcagatagtaagtgctcagtaaagatcagattgaattattacagccagggccaggcattggctaaagcatcatctctgtcaaagtggttccttactgccgccccacagcaccaggatttgagagtacaattcattctgactggaggtaattgagaggacttttgaaagaggtgagatttggatttctctttagtcagaagtggtctaatcagggctgagtctgtgacatcagggagatgcctacattgagggatctgaggatctgcctagagcacagcagaggcccccttttctggagaatcacaggggtaggcttggatagctgtggctggaatgttaagactcaaggatgctgagggctggggacagcctgctgaaatcttaattatgaccagcagagggagccctagttactacagccagcctccagaatttaacaactagtcaacgccagactcaggaacctagtgatttcaacgtgcaacccgggaggcggagcttgcagtgagccgagatcgcgccactgcactccagcctgggcgacagagcgagactccgtctcaaaaaaaaaaaaaaaaaaaaaaaaaaaaggagtgagataagcgccctccagagtacattgagagcagctgggaagcttgttataaatgcagatcctaatccaacatgggaggcggggacaaggagctggggtaacatacagatgtgtatcaggccttccaatctcttggcctcacctgtcacttgtgccagtcgctgctgcaggaactggtgttgtcacctgactgcatctccctttgcacccgtaagcagccacacacttcaaactggaagtacagaggagttaataccctgcatgatgatcctttcatcaaagagatagggctcaatggatacattcttccacctttctcacagaggcgcacagccctgaaaagcagcttataatgacttatcgaaggcaatcatttgggagtttgggcgcactggctcacacctgtaatctcacattttgggaggtcaagacaggtggatcacttgaggtcaggagttcgagaccagcctggccaacatggtgaaaccccatctctactagaaataataaaaaaaaaaaaatagccaggtgtggtgatgcatgcctgtaatcccagatactcaggaggctgaggcaggagcatcacttgaacctgggaggcagaggttgcagtgagctgagatcacaccactgcactccagcctgggtgacatagcgagactccatctcaaaaaaaaaaaaaaaaaaaaaaaaaaggcaatcagttgcacttagcagtggctagctcaataacaccctagtattggctctttctctaggaaagccctccttaataaagtgtctacatcttcacttgagcctctgctttcttgggatgcagactacaacaaaatgaaacaaaaccagccatatgttaaaatttgttgaacctgtcttgatgggtacatgggactttattatcctattctctctatttgtgtatgtatttgaaattttccgtaacagaaaatacatacatacatacaatgcatattctggagatggaaattcaggaataaggacctctgtaaaagcaatgaaaatgctgacaaaaattgtcaaaatcaattttatagaactcaaaattaaccaaatttacaataatctgaggagcattcattccagaaaattgcaaaatctcaataaaaacaccaagatctgtgactttgtaatttgacctgtttccctccccctttctcttctctgtagccttataacccggaagcctcacaatcacccatatctttaaaaaccagtaacgcagccaccagacggggcagaccagtttgaagctccttatgtagcctcatccccagaacattgtcactatttgattcatcttgcagctccctggaaaggtgttgtttttacatgatctgacttaaattttgccctggaggagaagtcctagtcccaaagtgtttttcaaaaacaatcagcagcacctgtttaacatcacagctgcctggagcagtgataccaatttagtcaaacaagagcctagccaaaaacgtagagaaagatgtgagaagtgaaatatccacattgaaaagatctggcatattcctgaggatctagaaggctgttttgtgagcaggcttgtgtgaggcctcgagaaagcctcaatatttcacatatatttggccttgaggtcttatgccagcaggaagtaaaggctaaagcagaaatcctagaactgccaagtgatgcagatgtgccccaacacacacagagagccccttagcaaaggatacaaacacttattgatcaaggaatttaagagaatctccggccaatcgttagctgaccactaagccaactgaacagagacaacaatagcagcacagcaaaaaagtgtggaaatctgatttccagagttcccaggttctattatgtagaatgtccagttttcaacacaaattatgagacacacatgaaacaggaaaatatgtccatactgagaaattaagtattaataaaaactgtccccaaagggaaacagatattgtacctactaggcaaagactttaaaatcagatttataaatatgttcaaagaactaagagaaagcatgtctaaacaattaaaggaaagtataggggtgatgtctaaccaaatagaggatattaataaagagatacaaattacaaacaagaaccaaatggaaatcccagcattgaaaagcacagtgacttttcataaaataagtaaaatgaaattttgactagagaggctcaacaacagatttcagatggcagaagaaagaatctattatcttgaagacaagttaattgagattatccaatctaagaaacagaaaaaaaaagaataaagaaaaatgaatctgtatgtcaccatcaagcacaccaatgtacatataatgggagtctcagaggagatgagagagagaaagaaatggaaataatatttgaagaaataatggataaaatttttctgaaacttaatgaactccacataggagaaaatcaaggaaattcacacttaaacatattattatcaaatagttcaaaggcagaaagaatctgaaaattaaaaaatgaactcattatatataatggatctttaataaggttaaaaggtgacctctcatcagaaaccacagaggccagagattagtgggatgacatattcaaaatgttgaaagagcaaggctgtcaaccaagaattaagagaaattaagacattcccaaataaataaaaacagaatttatcactaaccaacctgccccacaagaaatactaaaaagaatctgcaggctgaaatgaaaggacactagaaagtaacatgaatccacataaataaagattcttggtaaagttaactgcttagataaatataaaacatagtacacgtgtattattttttgtaactctcttttttcctatttgattttttgaaacttactacaaagcaacagtaatcataatagtgtggtactggcattaaagacagacatatggactcaaaggaatagaatagagagcccagaaataaatcttcacatatatagccaaatgattttttgcaagggtgcccaaaccattctgtagggggaaaagacagtcttttcaacaattggtgctgagaaaactatatccaaatgcaaaagaatgaagttggactcttacctaataacatatacaaaacaaattcaaaatggaccaaagaactaaatctaagagctaaaactataaaatccttagacgaaaacagagggcaaatatttcatgacattggatttggtaatgccaccaaaagcacaagcaataaaagaaaaaatagacaaattggacttcatcaaaattaaaaactttgtaaacactatcaatagagtaaaaaggcaactcaaagaatgggagaaaatatttgcaaatcacatttctgataagggattaatatacagaatgtatggagaatccttaaaactcaagaacaaaaaacaatccaaaattttaaaatgagcaaaagacttgaagagagatttatccaaagaagatatgcaaatggccaataagcacataaaaagatgctcaacatgactaacaattaagaaaataacactcatttggatggctgctataaaaaaaaaaccacagaaaataattagtgttggcaaaaatggcactttggacaggacagccactatgaaaaactgtatgacaattcctcacaggatcctgtataatttcactcatgtaagttattaaagtagtcaaattcatcaagataaaactatgatagtggttgtcaggggcttggggtgggggaaattaggagttattgtttaatgagtacagagtttcagttttgcaggatgaaaagagttctggagatggatggtggtgacggttgaacaacgatgtgaatgtgcttaatgccaccgaacagtgttcacttaaaattgtcaaaatgctaaattttatgttacgtatattttgccacaaattttttaaaaaatcaattattttaaaaagacaacagcatgaagcaataattataaaactatgtttatgtgtttataatgtataaaaacgtaatttgtatgacaataatttcacaatggaagggcaaggaaattgagtgttattgaagcaaaatttgtgtatgcaattgacattaagttagtattaatctaaactagattatttttaaagttgagatgctaattttcaccccagggcaaccactaagaaaatgacttaagaattatagtgaaataaataacaaggaaattaaaatggtacactagaaaatattcaacataaaataagtcagtgacagaggaataaaagaacaaagactcgggacagaaaacaaatggcaaaatggcagatgtaaatcctattttatcattaattacattaaatgtaaatggcagctcagagagggtcctgtcaggggtacatgcatcttaacagagatttcatgtgaatagaatgagtgcttgagattttaatgctggaatttcagtatctgccagggaattggggatatacagtcatatatgtcaagtaggggcacacagagtgaagctactaattaggccgaaatcagactgtaaagaacagtgtctttcaaacgattccagctgcaaaatgctttcttcaaatcaaacaactaatgaaactttgatgtacataaaatagtcagggaagttctatgatttagtgggtgttggggccaggagctgggctcactctacctcccctcgtagtaaacatttgtgatgtactatgtcttcctccgtataccactgttaacatcccatatcaagtgcatgccatggcatctctctgctttgctttcagaggagcttgagaagactgctcagccatgtgttgtgcattccagaagtgtgggggtgttaacctctggaggtgacccacaaccaatggagactggtatcagccctacagttctagagggacagttctaggatgtattccatacagcttctcagacagtccccagtaagactgagccccagttacccacagtgatctactcattcacaaacacttgaccgacattcctcccttcccagtatcactcctaatgctccttcacttctgcttctttgactcacctcccaaatcgactatatgtacccatgattatcttagggttttgcttccaaggaaacccaaactaagacacccctcaccctgccccaacatgtctcccaagacacttgaagtctcctctgtggaatgtgtgtggcagtccctaccctaagctctccttccctgtgcttctcaatgatcttaaccttttgctcctcacctctgaaagccatctggactcagggaaaagttgacttcatacaatattttaaattctttatgtatgagaaaaataagataaacaggctatggtgattggatgtgggagttgaggggcaggaggagtagaagaggaccacaggcttccagctggagttggaagacaggaactgacaccatcaaagcaggttaagggaagacaaaaagacagcttgggacatgtgtttttggtgcttgagggatatcctggtggagtttctccagtagacattggttattgttttctggaactcagaagataagagatatgaaacacatcaaactacaggtgatattcaaagtcatgggcatggatgagatcactcaaaataaatgcttagagcagaaaaagaatttaagaatcactgtcttttaaccatggtgaattctgaaggctggattttagtggtattggaatgaagaaacttttattttcactttatacacttttgatttgttgtttaatatatacgtatctgtaggagttgagagtgagagaaaagagtgaaagacatggtgacaaagaccctcccatgttgtacctgctgcacccttctcctcacatcctctcggcacctgtaggaggggggccagcttcctaacccatgacccaactcagtgggcaggtttgttctagcctcttgacattagctacgccaggtctggccagcacggtgcccagacattgcattccatggggtttgctcaagggaggtaaaagctttatttgttctacagagtcaccacccaacagttgccaagcccctttggaatgttttggagggcagtttcccaagataggcatcaataattacacatatttttcagcctctttgagcaaagtcatataggattatatatctgaaattttggtgtaaattataatgtgctgaaagcactaacaagggggttgttattattacccaactgttgtcaccagcaatggcttcttcacaagcataaggcttcatgaactctcagagaggatggcctcaaggtgatctatgaatcccaaacttctgtgagttgtgaacgtcctcacaattttcacctttctctgagaactattgattctgtctttacttaactttttaatgtttttatacttttattgagatataattaacatacaatagaatataaatcttaagtgttccatttgatgagtttttgttatttttaacttttactttaggttcaggggtacacatgcaggtttgttacacagaaaaattgtgtgtcatgggggattgatgttcagattattccattccctcaagtaataagcacagtacccaataggtagtttttcaatcctaaccctcctcccaccctccacccccaagtaggccctggtgtctattgttcccttctttgtgtccatgtatactcaaagtttagctcccacttataagtgagaacatgtggtatttggttttctgtttctgtgttagctaaattaaaataatggttcccagctccatccatgttgctgcaaaggacataatctcattcttttttatggctgtatagtatcccatggtgtatatgtaccacattttctttatccggtctactgttgatgggcattaaggttggttgcatgtctttgctattgtgaatagtgctgcaataaacatacacgtgcatgtgtctttatggtagatttatattcctttgggtatatatacaaaaatgggattgctggttcgaatggtaattctattttaagttctttgagaaatcatcaaactgctttccagaatggctgagctaatttacattcccaccagcagtatacaagtgtcccctttctctacaaactcaccagcatctgttatttttttgactttttactaatagccattctgcctggtatgagatggtatctcattgtggttttgatttgcatttctccaataattaatgatgttgagaagtttttcataggtttgttggccccatatatgtcctcttttgaaatgtgtctgtttatgtcctttgcccaatttttaatggggttgtttgtttttgcttgttaatttgtttaagttccttatagattctggatattagacctttgtcagatgcatggtttgcaaatattttcttccatcctgtaggttgtctgtttactctgttgatagtttcttttgctgtgcagaagctctttaatttaattaggtcccatttgtcagtttttgtttttgttgcagttacttttgtcttctttgtcataagatctttgccagggcccttcctagattttcttctagggtttttgtagttttaggttttacatttaagtctttaatccatcttgagttggtttttgtatatggtgtaaggaaggggtccagtttcaatcttctgcacatggctagcctgttatctcagcactgtttattgaataaggagtccttcccccattgcttgtttttgttgactttgtcaaagatcagatggttgtaggtgtgtggctttatttctgggttctctattctgttacattggtctatgtgtctgtttttgtacctgtaccatgctgttttggttactgatagccttgtagtatagattgatgttgagtaatgtgatgcctctggctttgttctttttgcttaggattgctttggctattcaggctgtttgggctccatatgaattttagaatagtctttctaattctgtaaaaaaatattatcagaagtttgatagaaatagcattgaatctgtacattgctttgagcagtatggccactttaacaatattgattcttcctacatttgatgagttttaatcattgtacccaccatgtaaataccacccaaatcaagatgtagaacatttccatctcctccctaaaatagaattttttaaaatttttttcaattttttattgtggtaaaataggcatagcataaaattgcctattttaaccacttttaaaggtacagtttagtgatactaaatatattcatgttgttgtgcaaccatcaccatcattcatctcaaaaactcttttcatcattcaaaaataaaattctatactcattaaacaataactctccattccccttttccctgaacccctggaatttaccattttactttctgtctctataaatttgactattctaagtacctcatataactgaaatcaccccatggctattttcttggtgtgaccatgggggttacatttaacatcctaaagtcactgcactctaatttgaatgtataccaccttaacttaattaatacacaaaaactctgcatctttacagttccatccccacccattcagttgtaaatgtcacaaaagtagtctcttaaatcatgtataaaacaaaaaaggagttataaaccattgttatgataatactagcttttatacttgcccatgtgtttacctttaccgagattgttatttcttcaaacagctttgagttactatatagtgtccttttatttcacctagaacaggttcagcagtgacacagtccttcagcttttgtttatctggggatgtcttaatttctccctcactttcaaaggacagttttgctggatacaagattcttagttgatagtttttttcttttagcctttttagtatatcagctcactgcctttgggcctctaaagtttttaatgagaaatttacttttaatcttattgagattcccttgtatgtgagaagttgcttggtttttgctgctcttaagattttctgtttttgatttttaagagtttgattttaatgtgtcttggtgtaggtctctttgagttcattctacttggagttcattgagcttcttggatgtttatattcatatcttcatcaaatttggggagttttcagcaattatttcttaaaatattttctctgcccctttctctcattcttctccttttgggattcccacaatgcttattttttccacttaatggtgtccaccacaggtttgttaggttatgtttacttttcttcaatcttttttttttttctgtttcccatattcaataatttccattgtcctgtcttcaagtttgctgattctttcttctgcctgttcaaatttgcttttcaatccctctatcaaatgttttttattttcttgcttgtacttttcagttccagagtttctgattctcttttggtttttatctcctttattaatatttccattttatttatacatttgttctttattttcactacatttttctttagttctttaagtatctttaagacagttattccaaagtctttgtccagtagatcaagccttttccagaaacagtttctgctaatttattttttcctttaagtgggccatactttcatgtttctttgtgtgcgttgtaattttttgttgaaaactggacatttgaatctaacaatgtggtaactctggaaatccaattcccccttacccagagtttgcagtttttttgttttgtttatggcttttgattttttttcttatagaccgtctctgtgctgaaaatcagcctaaggcataaatttaaggttgtatcgggtctttgctgagcctgccccttttgggagcatgtgcagtcgttttttaatttcctccatgaatacagttgcttttgaatgtcctagtgtctaatatctggtccccaaaagcacaaaaacagaaaaatgaagggaaagtcagatgtcccacccctttaagtaccctggaatttgcttcagctggagggagaggggcttgcagcaatgaggggaggtgtaacaacaatgattgccacctttttggctgcatctctgtgattagaagcagcaatcagcaatcagagcacagattcctgatatttggaggacagggtcccttttgcccactctggctcttttaagctgctcccagaatgtgtgcaaagtttcctaccatggagaatgggtagttgctactgcactaaaagctaaaatttagtaaaattaattgcaatttaccatccaaaccttctcttggcatttacaagccttaggtagactccagagtttcaaaatagttatatcagacagagtctggcagttcaattgttgcctaggtgaggaggcagattccttgtgcttcttattcttccatggccctagaatattctatttacttaattttgttacttaatatatttctttaaggcaactgcccactttttcttagcatcatactaagcaataatatctatcttttatgagaagccagacccagctctgaactgacaccaggcctcattctccaagtggaccacccgtcatattcctcatgagtctttcaaaaacatgcaaagaaaaaatgaaataaaaataaagttcacttttttctttctttagaaacagggtctcactctgttgcccaggctggagtgcagtagcaccatcatagctcattgtaaccttgaactcctgggctcaagcagtcctctcgcctcagcctcccaagtagttgggactacaggcactcaccaccgcacctgtctaatttaaaaaaaaaaaattttttttagagacagggcctcactatgctgcacattgcttgacctcctggtctcaagtgatcttcccacctcagcctcccaaagcgctgggattataggtgtgagccaccatgcctggccccgaagttcactttttctaatcagcttactaaaaggtgaaacgagaaaatgtttttcccccttttaaagaaagtatttttatttttactttttattaatgacttacacacttactaggcctgcccttagcaattgccaggctggggcaggagtagaaacggagttttatgaatttggtatgcaaatatttaaaagtcataagtcatgttaataagctgctaaaaaatatgcattgtctactccagccttgacaaatatgtatattcaaaatgacctagaagactcagtgtaaattttagacagctccaattttgtttcataaataatagtgtagaaaaagctccctacccctggccctagatcatctctatcttcctccccacctgtggctctgtgccacccttcagagtataaaatgacaccttgggactcccagtttaaacaacatatcatagacttgatcaccccacttgtccccactgagtacaacaataagccccagaaataactcaagaggcaacaaaaggagaactctgagaggtggtaagaagaagatgaactggttagagatcccaggactggaggaacaacacagcagccaagcatcttacagctcacacccaacagaggaaggttacccagccccagccccagtatagcaactgaaggtggctcgggtttctgcaggaagtaaaaaagaaagcactaccccagttttgtttgtttgtttgtttgttttttactgcttttctctggtttttctcttaggataatactagcctctgacttgtcatgcatatcaatagtttgttcctctttgtagctccatagagaaacacagtatagatgtaccatggtttaacaattcatccgccgaaggactggctgttttcagcattggagtattaagaataaagttgctatagacattcatatacaggttttagtgtgaacataagttttcatctctctaggttaaatgccagtgaggacaattgctgagtcacacggaaattgcatgtttagttttgtaagaagctgccaacctgtttccagagacgctgtattattttatattctcactggaaatgtatgactgatcctggttctctgcatcctggccaacatttggaacaaactattaatacatacaacaattggaagaatctcatgggagttacactgtgtaggaaaaaatgttaaccctaaaatgttacatactatatgtttctatttatataacattcttgaaatgacaaaaattatagaaatgaagaacagcgtagtggttgccagtaggacagagggagtgtaggacagaagttgatgaagttgatgtggttataaaagaacacaagaggccgggcgcggtggctcacgcctgtaatcccagcactttgggaggctgaggtggacggatcatgaggtcaggagatcgagaccatcctggctaacacggtgaaaccccatctctactaaaaatagaaaaaattagcctggtggggtggcaagcacctgtagtcccagctactagggaggctgaggcaggagaatggtgtgaacccaggaggcagagcttgcagtgagctgagatcacaccactgctttccagcctgggcaacagagtgagactctgtctcaaaaaaaaaaaaaaagaacataagagatccttttagtgatggggttgttttatacattggctgtggtggtggatacacaaacctacacatgtgataatatttgcatacaaataaacacacacacatcagtaggagtaaaaactagggaaatgtgcataaggttgacgggttgtatcaatgttaatttcaacgtgatactgtactgtcgttttacaaggtgtcaccattgggagaaactgggtaaacagtaacctgggatttttctgtgttatttctcacaactgcatgtgaatctacaattaccccaaaactgaaagtttaactttaaaaagacacctcagccaacatgttcaagtgctatcggtaccatcacaaatagctgccctggtccatttctcagatctggaggtacacacagcagtgttcagtccaccaacaagaggactagcctgggaaagagaccagttcacaatttacatgcaggcgcagagctgtttgatcagggtattcagtggtccctgacatggtctagacagaagatggggtcacaggctccatgtggacatggcccattgtccccacaggctcctgaccctatagggaaggatatggtgtatggcccaggtctaagtacaagtcaaatatctctacaaggttggcatggaaaacatcacccatccacttttttttcctccagttgccccctctccagtagctacttctttccctttctacgggaggcagaattctaagatgctcaccatgagggttaatatcatgtggcaacttgactggaccatggagttctcagatatttggtcaaatattgttctaggtgtttctgtgagggtgttttgggtgagattaatatttaaattggtagactgagtaaagcagatggccctctctaatgtgggtggcccttatccaatcaggtgaagtccagaataggacaaaaaggctgactctcccctgaacaagagggaattcctcctgcctgcctgacttcgaatttggacatcagcttttcccttctttcagactcaaactgaaacatcagctcttcctgattcttgagcctgctgggcttcagagtagaactataccgttggctgtcctgggtctccagcttgctgactcaccccgcatatcttagcacctgtcagcctccatcatcacatgagccaattccttataataaataaataaataaataaataaaatcaattggctctgtttttcttgagaaccctgactaatataaccaccaatgacccttgtccttataaaatgccctcccttttgagtgtggatagaaactatgagtatgatatcactcccatgactatgtcacatttatggccaaaggaaaagtattctaggtaggccacatataatcaggtgagccctttgaaagcaaagagttttctctgtctggttgcagaagaggaaatcagagagacctgcttcagctggcctggaagaaagcctgtatgagccacttggcaagtgactatgggtagcttctaggacctgagagcagtccttagctgacagctagcaaaaaaacaaagacctcagtcctagaacttccggtttctcccaacaatctgcatgagcgtggaagaggaccccaagcctcagatgagaagcggccctgggtagcagcctggtttcagccatgtgagaacatcagcagagaatccaattaaatagcttagaccttccaaaactgtggaatagtaaatgcatggggtgtttttgttttgtttttcagaaagagtcttatttcacatagacaaggtcatgatttctggatattcttcctcatgctgcagaatacagacttgtcctatttagttgataactcaagttaaaaggacccaggacattttcaaaagacaccactaataagcacaccccttcctccactcttagggtttttttgtttgtttatttgttttgtttttaaagaagaacggccgggcatgatagctcacgctcagcattttgggaggctgacgtgggtggatcgcctgaggtcaggagttcaagactagcctggccaacatagtgaaaccccatctgtactaaaaatacaaaaaattggctgggcgtggtggtgggtgcctgtaatcccagctactcgggaggctgagtcaggagaatcgcttgaacccaggaggcgaagggtgcagtgagccaagattgcgccattgcactccagcctgggcaacaagagcgaaactccatctcaaaaaaagaaaaaggcgcgtattactccattttttggaatggtataaattgaagagaaagaatagaattgcctaaataaatttaaaaaagtaaataaggttataattctacctcatggtataattctacctcattagtggagtgctgcacacactaacccagaataatactgggcaattagattacatgttttattaattgaggtgaaattcacataacataaaattaaccactttaaagtgaacaattcagtgggatttaggacaattcagtggcatttgtgcaaatggtgacttccatacagttctaaaacattttcatcaccctaaacaggcaccttatacccataaagcaactcctcctcattcctcacctccaacccagcccttggcaaccatcggctttccgtatcattttacctattctgggcatctcatataaaaggaatcagacaatatatgactttttgtctgtcttctttcacttcgtataatgttttcaaggtttagtacaattgttttcaaggcttatctatgttgtaagatgttatcagtactttgtctcacttttcggctgagtaatgctccatgcatattccaccgtttatccattcatctgaggatgggcatttgggttgcttctgcctttcagctattgtaaatgctactaccataaccatgcctgcacatgtgcttattggaaattttacttcttttgagtgtatacttgcaagtggaatttctgggttttttgataattctgttgaacttttgagaaacaatgacttttttcatagatgttcttttaagctgctaagtttgtgggaatttgctacacaaagttacaagataaattcaacttttttacctaattatttttaaatttaccttcatacctctaaataacatgctctgaggaaaataattgctacttcttgatttgccagaaaaatagtgacaactgtccctatggcaaataagagcttacccctctcatattcctaccaccatcatgccaagtatagccttcccatctcccatcctcccagtactgttaagtcataacattggttactttactatcaggtgcttaccttattaagctttgtaaattcacagttgatccatgtagtaaaatcatgtttacttttcctttcctcagtaacattttgctttcccttccctggagttaatgattcaaagtctagcctttatattggcttagttttctatacacccactactatttcaatcccaaacattcactaattttttaaatagcctctcaagacttttagacacaccaggtattctatcagatttgacatcctgaggaagttttgcttggagtcttctgatctgttgtgccctggactgattggtttttataccaaattcccagctgatgttctggggcctcccttcagcatcgccctggaatctgtctcctaagctggatctattgtttcatgtagcaaatatattttcttcttacctggcttattcctttaatgttgcaggatatcctccagttgtcagctgtcatcctgggtctcccttcagcatcaccctggaacttgtatcctaagttggttctattgtttcatgtagcaaacatattttcttcttacctagcttactccttctttgttgcaggatatcctccaacagcttctcaagaaagggcccttaaaggcagatcttttgagaccttgcatgtctaaaatgcattttatcttcacacttggcttatagtttggctgggtatagaatcctacaatggaaatgattttcccttggaattttctgcactctagtgttattgttgggaaaaccaaagtcacctcaaatcccaatcgtttgtacctgatctgttgttttcctctggaagcccataggatcttctctgtgtctccagtaggctgtaatttcacagggcttggtaagtgcccattttcatccatcacccattatgcttgacattcagtgactcctttcaatttgaaaagtcatgtcctttgtttctgaaaatttgtcttaaaatattttattgataatttcctcccttttggctgacacactacccctccccccaccctgcccaccccatccctcccttgctggctcttattctatctctgtctctcattttttctaaaactcctgttgctctaatatctgaccttgtggattggccttctgattgtctttttctctcttggacatccttggttttctttttaaacaacttgctgagccatagcttcaactttattctcttatctgtatactttgagattttttttgtttccactatcatatttgtaaatttctagagctttttatggtttggatgtttcttttttgtatcatatcccgctcttgttttatggttgcaatattttttcacagctctgaaaacatcaagaatagtttattttcctgaatgttcttctcctcaaataggctgatccctctgagcttcttattttagtatgtttattttttttcctttctctttcatgttagaaattttctttagatgtctggcaaatcttttctgctgatatttaaaagtaggggctaaaaaaactgattgggactgggtgtggtggctcacgcctataattccaatgccttgggaagctgaggcaggattgcttgaggctaaatttaagaccagcctggcaacatagtgggacccccatctttacaaaaaattttaaaattagccgggtgtggtggtgcatgtctgtggtcccagctcttcaggaggctgaggtgggaggatcacttgagcccaggaaggtcgaggtgagagtgagctgagatggcgccactgcactccagcctgggcaacagagtgagaccctttctcaaacatcaacaagcaaacaaataaaaaactggaagttctgagtgtgtgcttgagggtgtccttgtagggtgactacacagggctgtggagctgaggaaactctcatgtcagtatctttaagtctttcctttggagctgacggaatcgtgagcactgtttcctcctggctgcggcatcatggtggagcacgtgggcaggtggaggtgggtgggccagcgtctcagcatccagtagacaaatgtcccttgaataccccattttcagcatagaccctagacctcagctgagcttgttgtgcttcagcccagagaccctctcttttactctcactgaagaacaaagccacagacttttgttgggccagggaaggggcagtgattcagctcacagaatgtggaggggacctgggacccactacttcataaataagctctcagccaattcttattttcttacacaaacccctccatcccaagctccatctacagaggtatctgtcaaattccagagcttttcagcttgctgcaaaggaagattgggttggttttcaccactgcctggatttctcgttgccaggtgagaattagctttttttttttttttttttttttttcagatctgctcattatttgcctgtcttccccctgcttttgagctttcaaggttttgctgttgttaacttctctctgattcttccgaagtccttcttgccgtactggtgaggcttcaggaactgactgcaggtgttcacgccaatatctatgccgggaagcccttttactcctctgttctgcaaagctctcagtaaggcatttttgtgttttagggggcggcattcatgtctggctttctgtagtgactggcctgaggatgagccaggctgtactggccaggacacagtcagagctggaagattatcactcctaaccatttcatcttttccttccttgttcatctcccttgagagtttgaaacattctttaaacacaggaaagactggggatttgattgtaagcatacttttttcaactgatttccttaaaaaacacttagaatttacaagaagaacatcattctcccaacagaattaaattactttcattctttttcccgggaaagttttgctggaaatgtcctctcctagctctgagctaacacaactctctgttaatgtatttcttaggaatcatccacttcaatgggctgccacttttgtgtatttgtttttctttcttatagataatgagttcctttaaggctagaaactgtgtcttattcatttttaatccttccctcttccccaccattatcatctgaaataaatgaatgaatgaaaagattctgagcaaggtaatgcctggtagcaggatcaggtctaactcctcactcttccacaatgcctcacccacatagacactaacataggcttggtggttggccaaatgaagtgcagaatcttgaacaaagtgataactggagcagcaaagccagagcatggcaacctccttgtatttctgccatgtccatccctgcccattgtagcgctagcaccatggttaagactatagatactaaactcagactctctgggttcaatttttgactccattcattatcaactttgtgaacttgagaagtatgcatattctttctgagcctcagttttcccttcagaaaagtgggaacaacactggtgcttagtagtaggtaaaatgcaaattagagcagctcctgacacgcagaaagtgcacagtaaatggtagcactgcagttctccaatgggtaatgaaaagatgactttatttttatcactgatctaatctttatgagccctggtcctgctgggttccagaaaaaaacacgtttttaaacttgggttaatcataccttagactcttccagtccaagcggtcttgtaattataatccagcccctgccgcgtaagtgcttaatctctcagactcctcctccttctgttctcctccaggattgcatctagggagcctggaatgggggcttctgtgagggaggttgggacccacatgttctctgtttacagacttgtctgctttcgcctggtcctttattggtgacagttgatgtgtgtctgatcacaactggccttctggatgtggtgctggctcccagcactggaggctgtggtccctgccctgtgcctccagctgagaagtcctcactttccatggcttctgtcccaactccaggctactgctggtcaacaagtcctttcagcgtcttcattcccctcccttgaccatatgggaacttctggatccctgcctgccgtggacaggaggcttgtttcaggcctacctctcaagctcctctgtctgcaaaaatgcatttataaaaggataaaggaggacccgcagaatcatcaggagcactcagcttccaggaataagatccagaacctcagaaccggcttgacgaggaaatagaagctgctaccaacgctcctgcccctgttctgccaatgctcctctggggcaggaactcatcctgcagctactagtaaaccatgatccccatggaagctggtctctgccaccattcatgccaacagacctgcctcctgcaggtaatccatgccatccaattgcacacttctgagctggagtcttgcttgcctgggtttgatctgatgagtgcatgtggcaggcctgcatcctacctaccagggaggctgggctttgagttttctgtgttctggctttggatggtgtgactattgaggctggaaatttgcaaaatacagcaaaggcattcaaaagggtctgcaagccgtgtgcagtggcatacgcctgtagtcccagctactcaggaggctgacacggaaggatcttttgagcccaggagtttgagtccagcctgggaaacatagcatagaccttgtttcttaaaaaaaaaaaaaattaataacaataaaaagaactggacagctagaaaacatgatgctacatgaagcaaaaacccttttttcattttattatgaaaattttcaaacatagagcaaagttaaaagaatttaatagtgaacaccatatgcccctcacctaggattctaccattaacattttactatgcttattttatcactcttccatccatcctttcgtccatccacacatccatccaaccagaaatttttggtgcatttcaaagtcaattgcagacattggtacacttccttctgaatacttcagcatgcctatggttaactagagtttgaaatttgtttacagtttttttcttggtgttaaattcacatataatgagatgtacaaatctaaagtgtacatttgctgcattttaataaatgcctatgtaatcaatattccaatcaaaatatagaaaaaatgatcactccagaaactcccctcatgcccctttccaatctctgtctctaaccacccccaaaggcaaccactgttctgatgtttttcctaccataggttggttggcaaaagccctctaattttggctttttcctgaaactatggaaatttgccccagaaagctgaaatcagatagaaaatctgcctgcttctccttccttggtctcacttctcttccccatactcaacacaggtgggctcccctcagtgccctggtagaaaggatttccctgaaatggtgtatccaggccaggtacagtggttcatgcctgtaatcccaacaaatggggagaccaaggcaggaggaccacttgaggccaagagtttgagacaagcctgggcaacacagtgcgagaccctgcctccacaaaacataaaataaagtaaaaattagccagacatagtggcacatgcctgtactcccagctactcagaaggctggggtgggagaatcacttgagcccaggagatccaggctacaatgagctatgattcattaagcctggatcctgatagttaatggaaacttaaagagtttactaaacgctttcttggcaaagcctagctttaaaaacaacattgtcttatgaaggacaaaacaaaacaaaacagaaaccaaaaaacctgatagggcagtcagtgctagatgatgacccattataattagtctcctctgccctgtcccggaagcacagagactcttggcttcagtgggtggggaacctcaggtcaacataatttaccagaaatatgactgaaaatatttcaaaaacactatcctcatcacagagtgagtgagccgaactgaaccaaggggaggatctagaatcagatgacatcgagaagttgatagcaaaagtgttagaaccgctgacatctcaataggttccacagtgattctccctttaatgagcatgaagaagtatttgctgaatgagttttgacaggaattaatgaatgcagaatggaagaaatgaatgaagaggggatcataagtgaggtgattcctgagcatccaaagcagtgacacagtgagatctgaagtctttgcagcttcagagccgctcgtaggtgctaacaatgtgtgatgtatggaaagacagacgaggccacaataggacacaggtgacagggatgaggccacctcttacctccaggcttgccacacagctctggcccacataaggtgggcaaggacaaggtctgctgatgacagtactagagcatcttgccttccaactgggtgagcacctccctgcaagagcatgaacgccagctgcctatcacctatgtcaccggctacaggcatggtcctaaggatgaggtgatgtagaggtgagttagagcttcacagtcttttattagttgcccgatgactttgcccaagggtgagagggagcagtatcatcttccattttatagccaggtaaacagaggcccagagaggggaagggacaccctgctgcccgaccagtccaggtctagctgtgataggttgttctaactcattgtcttgtgaggatgaattcccaaaacaacacaggtgactcccagccagagtgcacaggggatcctgtgtccagctggttgcttggcccttggaactcacccatgggcggtaccaggtctgtggttgctggacccacggggctctggatatgggggttccaagcagcagagaggcctggggtgccacccacagggcacagctgctctggatttttctggccctcagcctcatctttacttgagtccacagcctcaggctccctcccctgtgatttgggtcagtctgaagttttctcttaagggacagacctggaatcctagaggggaagtgcactctaggccagcagttctcaatcttttggggctcaagacccctttacacttttaaaaattattgagatgccaaagagcacttgcttatgtgggttatatctatagttttttttttactgatttggaagctaacaatgagaaacttacaaaaatgtatgcattaattcacttagaaactaaaaaacctattgcatcttaacacatacaacatgtatttatgaaaaataactgtactttccaagaacaaaaataacattagtatgagtggcattgttttagatataaatttttttttgcaaatttctttaactaaatggcaggcttaacagagaacagctggattctcatagctgcttttgtattcaattttttaaacattatatatcatgaagcctctggaaaattccactgtacattcagggctagggagatgctttgagtcctgaaaaaaatcatggtgcccttccaatccatataattaaaacaaaagtaaacttgaaattaagtaaacacaacacagtttttattttcccaaggtgagtcctttgattttttttttttaatgttaaaatattttttaaaattcaggccaggcacggtggctcaagcctgttatcccagcactttgggcagatcacttgaggccaggagtttgagaccaacctggccaacagagcgaaacctcgtctctactaaaaatacaaaaaattagctggacgtggtggtgcacacctgtaatcccagctactcaggaggctgaggcaggagaatcaaactgcttgaacccaggaggcagaggttgcagtgagccaagatcacaccactgcactccagcctgggagaaaacaagaccctgcctcaaaaaaaaaaaaaaaactgcttggtatccacactttactggtgtcttaagcatgtgaacaactcatcacagatcaaaggggaggggccctgcccaggcatctgtgcttggctccctggagaaagcctctcttccatcctcactccccatcaagagacccttatttctctgaactcctccccaaaggacagggtgctttagcacgacctcctcttcactggatttagggcatggtgctggggagcagatgggaggacagagagacctgaatccctcaagacatcctcatcaaggaggctgtggtgggaaggaaacaagccactgcagtgtgaggctcgtggacggacagacagagggacagatgatggacatgcccaggagctccaagcagtcaagacccctggagactatggcaatcaggcttcctggaaggacgtggagctggaattcagtttttaggacgggaaaaaggggcaaaatgaatgagaaatttttattctttcccctgactttaaagataatacagatttgtatagaaaagtaaagcaatacagaaaataaaaagaagaaagtaaaaataattacaactaatatttgttgggtgtgtgccaggcagtgttctaagtgctttacatatattcacatttaatttttacaacaaccctttgaggtaggcactacttttatccccacattacacataagaaaactgaggcctagaaaggttaacttatttgccaatagagaactaagtgatgaagctgaaatttgaccaaggcagtttgactccagagccaagatctgaggcaaccatctaaacacaggtaacccatctaaacattcatacattgagcatctactacatgccaggaacctactaaactttagattcatgactctgactgttggctgtggtctcctacttgagcacataggatagaagaacatgatttctggaagtagcttgttcagcatcttcatgccatggtggacttgggggtattctgggggggtgctgctgagcctgtgtgaggccaagtattcatgaagagcaacaaagagacttgggataaattaagatggtactgctggccaagcgtggtggctcctgcctgtaatcctagcactttgggaggccaaggtggtcagatcactttaggtcaggagttcgagaccagcctggccaacatggtgaaaccccatctctactaaaaatacaaaaactagctgggcatggtggcacgtgcctgtaatcccagctacccgggaggctgaggcaggagaatcgtttgaaccggggagacagaggttgcagtgagtcgagatcgcaccaccgcactccagcctggggaacaagagtgaaacaccatctcaaaaaaaaaaaaaaatgtattgcaaaaggcattggaggccaccataaagagtttgaacttaggaccttgttgggagtgagaagccacagggcctttggaatgaggagtgccacagaataaaaatggtggtttgaggatacgtatgtatctagagggaaatttggcaaaatatatcataattttgcttgtttatttgtttttagagacagagtcttgctacgttgcccaggctggacccaaactgggctcgctgtatctttccacctcagcctcccaagtagctgggactacaggtgcacaccaccatgcctggcttgttattttaaataataataataataatgtttttgaaaggtagtatatacccacagtcaaacatttctaagagttcaaaaattaggtttctccctgacttctcgtttctaccacctccttttattttccaccttactttttgtttttaattaggcaatgtatctaggagactgtttcatatccacgtgcatcagtctgcctccactttttaaatagctacatagtattttattacatggatagatcataatttatcccattaatgaagacaggagagttttcactctttctgttataattaatgttgcaataaatatcctcgtacttaaatctttccacacttttggatccatctgtcggacaaattcctgcacatggaattgctgtcttgaagaatggctcctctcaacaatttcacttggcagaaattgtcccatcatagaagcacacaaaaatacatgcaaacaattaaatttctttataagggcaaaaaagtggaaatgacctaaattcttataaatttaagaagggttagtaaaattatgtaaattcacacaagagatgacattaataatgacagtgcatagctatattctatgatttgaaaagctgtcatctcagcactttgggaggccaaggcgggtggatcacgaggtcaggagattgagaccatcctggccatggtgaaactccatctctactaaaagtaaattaaaaaaaaaaattagctgagcatggtggcgggtgcctgtagtcccagctacttgggaggctgaagcagaagcaaggtgagaacccgggaggtggagcttgcagtgagctgagatcgagccactgcactccagcctgggcaacagaacaagactccgtctcaaaaaaagaaaagaaaagagagcaccatgtttggtcaagcaaaaaggacgggttacaaaacagcttctgtgtatgatgcgattcatgtaaatttgttgccatgtgtatacagccgtatgcatgtatactttcttcactccctgtattgcttgaattttgtacctgagtatgtattatctctatagccagaagaacaattaaattgcttttaaagcatctgattattccccaggcacagattttaatttgtgaagcacccactttatgcctggcattggggtaccctgagccgcccaaggctttggctcccgtctgtcatctctagcctgatcatcagaatcagagaatgttggaactggtaacacttagttcacacccgtattttacagatgaaggcaataaggcccagagaaggtaagtgacctgctgaaggtcacacagccagtttggcccagagataacagaacccaggactctactgccaggctatgatgctcacttctaaactgagtatgggccgggtgcagtggctctcacttgtaatctcgcactttgggaggctgaggtgggcagatcacctgaggtcaggagtttgagaccagcctggccaacatggcgaaactgtctctacttaaaatacacaaaaaattagccgggcatggtggcacacgcctgtagtcccagctactcaggaggctgaggcaggagaattgcttgaacccgggaagtagaggttgcaccgagctgagatcgtgccgctgcacttcaccctaggtgacagagcgagaccctgtctcaaaaaaaaaaaacgaggagtatgaattattatttggggtctcgagcagtggggcaggcagtgattttgatgccctgtcttctgggagctcccgtccaagcaagcccaggatgaaagataaaagggccctgaataagaccatcattagtggggaggagcctgaccctgcataggcagaaaagcagcttcagcagggcccagggtctacagggcagcagcctgcagggtgttgaggaaggagctgccctgggctgctgccagatgtcagtaattataaggctatgtgggtctgcagacagctcattaaagacgcttgatctgcgtgaaaccaggaagcagaactcagcctctttgccactttctgtaagaaatccaaccacatcaaacactttggggtttttatgcagtttcctgaatgttggggtgatcccagggagcggcctcatcctactgtgctcagcacacggttgtctccttacccttccttgtctctttccctcgattctaccccctcccacttccccttcctcactggcccaggccacatccagccttcgatagccccaagtcatccatcaaagcatttctccggcaaaaagaaacctaccccaccggcttccatgaaaataaaatcccctctatttcattaacaaaagacctcagatgccttgaattccagcaccttcaagcccagaatcttagactttgagctggaatggccctgaagaataattgagtccaatccctttagtttgtaggtagaaacaccagggttccaggaggggagaggtcttgtccaaggtcacgggacacccatggccaccaggcctctaagctcctggctggaggccactcacaaagtcagggcagatgggcctagcttctgagtcagaaccagctctcccctttttcttatctacctcctctcaagagtctagtgtccaccaaggaagtctagtggccctgaaggaggatcatggacctctgcctctttagatgcctgcagaacagagtggagctgtgggcccaggagtcttctgctctcacccaggaggggagagggagccacagactgacccggcactgcagcgtgcaaccatgtacttcggggtcctggcgctgagcctgttttttctcatttgagggttgttgtgagggctaagaatggccaaccataaatccgagttccctcagtcttctctctttccccgttctttttcttgccaggcttgtgacctttctgagcctcagtttctccacagtcccattcgcaactccgtgtttccaaggtctcttggcaggagccactcccacagtgaacccctctaggtgcaattacaggatgattttgtgtctcgtgggtgtcgctgctagggtggagggccacgcctcctcttttgaattctgactttcctgcctaggagtgtcccaaggttttccttgttaaaattggtctggctggctgctgtgacgcgccacactgtcctgacggtgcacacactgctgtgtggaggaacagaggagtccagctggccttcacatggcaggtaagtgggcagagcctggggccttgggacaccagggctcatgaggggggcttcaagaaacacgggtctgtgggatgacgtttgatcatcgattgttaggattttacagctggatagtccaccatgaacacatgaactcttcgtgtggattcatgaggcccaggatgaaaaagccagctttaagccacccagcaaggccatggcccaggctggctcaggcgctgtctcctgggctggggccaggtctcacccctgtgcctcggaggactgaaggaggcaggcacaggaaggcaggggcagaaaaaagaaaatctccttgcaccccatgcacattccatggatccagagacgtttctgggcatagttgggaattgtggcctgcgtgggaaggagtgagaggcccccaccggctgcatcctcgcctgattcccaccccaagcacttgagggcaagagcagctctggctcaagtgaaaacagctatatgaccttgagcaagaaaatttgcccttggtacctctgttttctgatctgtgtaatggggattataatgcaaattatctcacagccttgctgtgaggagttggtgagaccacgtgtgctgttctcccaccacacatctcaagtggggacttgtaaacagtagactcagaaaatgtgggtcgggcacagtggctcacgcctctaatcccagcattttgggaggctgaagggggtggaattcttgagctcaggagtttgagaccagcctgggcaatgtggcaaaaccccgtctctacaaaaaaatacaacaattagctaggcatggtggggaacacccaaagtcccagctacttgggaggctgaggtgagaggatcgcttgagcttaggaggtagaggctacagtgagccaagatggtgccactgcactgcaggctgggcaacagagtgagaccctgtctcaaaaaaaaaagaaagtaagataatgtgtcccccacgacctcaatatagtgagcagcaaactccctctgcaagaacttgtcttagatgctggggcccggtaatgagcaagtcagcagaaccaggggtcctacactcacaggtattcaaggggtgtttctgagtctgtgtctgccagttttaattgttcagcattatgtgacagttttatgaatcaaatatttttttaactttcaaaggcagatatttgaatttcctcatcatagtctagcttcctcttcatatttcctcctggcagttaacagcattgctggacgtgttgggcccttcaggctcctaggataggtctgttctgaagaccaggccttgccaacaccagctcacagcccagactgcctgtttccagagctggggttgcctccctgatggccctggtgcagaggggattgcctttgttcctccaagatctgcttctcaaagttcacctagatgatccctcttccctgggcctttgataacctatcagacttaaacttgacagtgcgaaggttagtttctgaggaaggaaaaaagttgatgatgatgcccattgtcaggtctgtaactaacttgctgggttcctctctctgaagctctgtttctccgtctgtgaaatgtcagcattggagttgtcatgcctatgtaaatggactatgtgttggattggattcaattcctgggtcttctgggtcctcttggcttcttgggaggatctgttcctcagagcagtaggtcctgcctaccacacactctgtgcctgaatgactgagacatcagatcctagatggaaagtgtattcatcttcctggagctccttctatcccccctccctcactccatccatggtggacatccctagttgaccccagagctcttccctctggagcctggatgtggccccagaatgctcaacccagctctttaagtaccagttgatcagtgttggcaaaggaggtgagacccttttgccatgattaaattacaatcatctttcagctcagagattccaagaattgagtggaatactgtatgtgaggctggctctggctgggacattgggttggagttgatgagtcactgcctcctggtgaaagagaggccagcagcttccaacaagaccaggaaggaaagagagatggggcagtggccccagaaaggccccaggcaactctcgataaatcatttagtcatggagttcaggtgctcatgatgcgtactaagcataggattataatggggcccattaaaaaccaattatgcttagtccagagtctggaagatgccactggcttcaacagagtttccagggctcaagcccactggcctgagacaaagaattggggaggattgtatcattcagctctctggtatcacccaagggcaggaggaggaagatggatgagctaggcttgggggtggggatgggtggagagctaagtcggcaggaggcaatgttctgcacatggacccttccctttcttaggtggagctctggggccagctggtgagcaaattagttggggaggaggtcagagggccagaagtgatgggcagggcctgactgtcaaggaccttcaatgccaacaagatggctgtagattccatggtgcttgagcagggaaaatgacatgctgacactcagaaaagtcccttctcctctctgaacctcagtttctccatagtgatgggatggattgaacaggttgagctgaaaaacactctgaagctgttggggccatacagtcgcttaagcgagaagcaaagaggggagaataacaagaaaccccgtgcatgtaggaattggggaggggaggaccaaagtgatgggggagatgtgggaaaggagtgatgatgtaaaaatccctgtttgtaggccgggcgcggtggctcactcctgtcatcatagcactttgcgaggccaaggtgagcggatcatgaggtcaggagatcgagaccatcctggctaacacggtgaaaccccatctctactaaaaatacagaaaattagccgggcatggtggtggacacctgtagtcccagcttctcgggagcctgaggcaggagaatggcatgaacccgggaggcggagcttgcagtgagcagaaattgtgccactgcactccagcctgggcgacagagtgagactccgtctcaaaaaaaaaaaaaaaaaaaaatccctgttcgtagagctcatcactgtggacccagcaccaggctacgtacctgatgaatagggagacgttgatcctggtggaagcccattgccctagcgtgtttattaatggcttctcctttcactctcagaatttcctgctttaagtggtgcattttatcactaccctatgtataattactaccccatttaatcctcctcgaaaccctagacgaaagatattattattgccactttccagagaaggaaatcggatcctcagatccagggccacacagccaacaagtagatgattcaggatgtcatgaattggcagagcacaggaatggcagctaggaggtcttgtgtaaatagtaatgatgataccactcacatttcctgagaacctagtatgtgcctggtaccagtctaaatactctatgtgaattatttcacttaatcctcccaacgtgaggaagcgggtatgatcatcaccctcattgtcaccaggagactgagtttcagagctcactcacttgccacacagccaacgaggggcaaagcctgcatgtgagctcaagtgtgtgcctctgaaatcaggcttctagttgctgtgcagagtgaaaggaagcgctgagaagacgatgagagggagaaggggaggagagcagacaagctggaggggctatgaggcttggggtaacaggcaggtggagggagcactcttaccacatcctttccctgtgcctggggggtacagcctcagccctggggttggcgagcctttagccttgggctgggagctcatcctgcataccccaagggtgaaggcccccagagctgaaaacaggctgccagttctgtcctcagggccttgggttcactgtcaactggagcagtcttagagcagatgctgcctctcccatcccctccattgggcagtgggtgagctacctctcagaggtacggcaagctgggaccatgatcacgtattcaccaagaattcggccaagggaatttgtgcctgggcaggaagttgtgagggagatggtctctgagatttgaggataatgatgataatggcagttctgactcatcccacctcctcttgcccgtctgtgttaaggatgcagatgcctcagagggtgatgggagctgctttgggctgtggcagggaagagggacaaccagtgcaggaaaaccatgtcctagaggctatgtgacaatcttcacatcagcactctctcggctggggaggggggaggtgttgaggtgggggttgtcttgtagggaggagggctgagaggagtccttgggggtaatcagaagcacttgcttcagcaaaccacagactatccaaaccatcagattccttctgggtcattttacagagaagaaaacagacccagagaggcagtgggtgggagtgggtggtcagtggccagtctgcctgcccatgtcagaggcctcacacaccctcctctttctcactctgtggaaggaaagaagttaagaaggaaaggcaggctttggaatgtgacagcttgagagagggattatggggtgggtggggtgtggacagtcggagcgtgagcagctgacagggtgtgggtgctgatcctcgagggcgggcccaaggacgctgcagagcatcagctccccattccgtaccccagccaagggatggggaaggagattcattcattcatccaaccaacattcactgagcacctaatatgccctgggcccttaaccaggttctagcaacccagggagggggagactcagccttcgccttcatggagctctcagtccagtgagggagagacgtatgtaagcaaacaactataacacagcatccctgatcacagataagggacagaagcctccgtcttaaaagaatttgagctgagcacatggaaggggtgatactgggtttattttgacaaggggcctggaaaccatcccaagtgcacatctatctcctcgccttgggctgccgtatacctaggagcctctccccatgcccgtcagtctcactgtccccatgaggactaagagggacactggctaggacagaacgtatctgaaatcaccggtagttccccctgcagaatcctggaccccagccccggctattacaccacatatggcaggtcatggaggtgtgatgctgatggatgtggatgacttagatcaccaaagcagcagctccagggacagattccacagggatcagaacagtgacctcctgggttatggggtgagtgtagagttgggcaggggaggtgccgggggctggcagattgggatttctaggtggtttctgcaaaaccccatcaaggagcaaaagaagaagtgtgttctatggggttaatggggagcaaaatagggacaaatggggagaagctgcaagaagaaagagcttggctcagcagaaggaagggctttctaacattgggcggtgagtgagctacctctcagaggtatggcaagctgggaccatgatcaagtatccaccaagaattcggccaagggaatttgtgcctgggcaggaagttgtgagagaggtggtctctgagattccaggacaatgatgataatggcagttctgactcatcccaccacctcctcttgcccgtctgtgataaggatgcagatgcctcagagggtgctgggagctgctttgggctgtggcagggaaggggggaaaccagtgcaggatccatggagcttgaacccatgacccagggtccagcagccctcatccaatcccaaactccccttgtatccagccctggggcataccagggctgagataattaccatccagcaacctcgtcgtctgcttctgactcatccactgaaaaaatagcatcctgttctggcctgtccctacatacattgcttgggaagtagcaacatgaattgtgggctacaaatccagtgtgtcctcaggcaagaagtccctttcttcccatttctgggtctcagcttatatgtcagtaaatggagacctgagctcctaatggctcttccagctctgctgatattagacttgacaattctatgtacaaggtacctggttgcgggagagggtcctgcttgtgttttctgactaaaccaaggtcatctgagctcaaagttttggagtttcagaggtttgtgcctgccctagaatgactggggctaacttgatgtgaaagatttggttttactttctgttgtgagaattggcaagggtaatggaaaagccccctggaactgttgttccagctcgtgccacatggggtcactgttgaacactggtcctgcacagtgctcactcaccacagcaggggctgtaggagctcccaatcttgggacacatgtgtcagctatgtgagttcctacccacatgttcagtcattatccccatatcatgatgccagcaggggcttctggcctaggctaagctaaaactagtattttccatgaatctcaagcctgattattgagaccacagcaccagcccagacagctcacaggtggagagcagttgggaggttgttgtggtctagacaagaatcttggctctctccatgtttcagttttcaattcctgtgtagcaaactgccccagcacttaggggcttcagacaacaatcattctcctgcttaggaacctgcaatttgggcagagctcggcagggacagcttgcgtctgcatcagctggggcagattgcctgggggctgaaggacccacttgccagatggctcagtcccatggcttccagataattctgtctgtcagctgggagctcagtgggctgtgggttggaagccttggttcgtctccaggtgagattctccgtgggccatttgggtttcttcatggcatggtggctgggttctaagagcaagcaacccaagggaaccagaaagaagctgtattaacttttataatctagccttagaagtcacaatgtgtcactctgtcttagccacaagtcttccaggtccagagggtgggaatatatgctttacttctgcaatgagaggagtatcaacatcatattgaaagaagagtatgtgggatgggagatattattgcaaccacctttggaaaatcaatctgccacatgctgttaactaaaagattttacaaagatgctggaatctttaaaaagccaaacattttgaccagccctgtccagacacttgcccacacaagccactgatctgatgcctgtggtgaagctcacgttgaattttacagtctgtaacttctaggctgtgactcctatggggtcaaagataaaggcaccatagcctggggatagacaagccaccaactcaggaggcagattcccagctccatcacttagaaggctgtgtaactctgggtcatgtgcagtggcttatgcctgtaatcccagcactttgtgaagctgagatgggaggattgcttgaggccaggagttggagaccagcctggtcaacatagcaagaccctatctcaaattaaaaacaaacaaacaaacaaaaaaaaacaggctgtgtaactctgtacctcagttttatcatctgtgacattgagttaacagcagtacctccctcatatggtttattaagattaaatgagctaatatttataaaatatttggaaaagcacttggttcataggaagatttattaaataaaacctatccaatggtctagccaacaattactgacatttcctgtatgcttggcatcaaataagatacagccaagagttgcatgacaagtgtcctttggtggggagtacctggtgatgtaacttcagtggttctcaactgtggcagattatatttcacagggtggtcatatcagtatacatctcagctcaatattctttttacaatgggacatgacgttggtacattttcagcaagagatggggcatgttccttctctttgaacctacataggcctttgtaactgccttgacccataggataaggcggaggtgacattgtgtaacttctgaggttaggtcataaaaagcattgcatcttccaccatggtctctcaggtcacttgctcaggggaaactaagcaccatgccaggaggacacccaagcattcccatggaaagatccacatggaaaggaaccaaggtgcctcaacctgtattcagcaccagtttgccagccatgtaagttagtcacctttaaagtggatcctccagcctcagtcaagccttcagatgaacatggccccagctaacatatgattgcaaccccataagaaactccaattaagagctggccagtggagctctgcccaaattcctgacccacaaaaaccatgaaagataacatatgattatcatttttccaagctaaactctgggttaaacagattggttaagaagcaatagatgagtaaaacatcaacttttttgtccgtaataccctccctctcaatataacaagtatttaatagtgtcccttcaccaacctgaaattgaattgacacatcttacctacctctatactccactttttaaaaaattgtatcctaactataatataaatagtaaataagaggaaatcaatttttcactaaacatagttaagtatgtaaatgcttattgaaactttaccagaagacatgatgaagtgatcagatgccatcctgcgactgtagtgaatcaagacaaaaacaaggccactccataatcatgagtgaacacagacaaaaacatgaacattgtctaagccacttactggtctcgatctactgacatattagccctatagatgggctaatatgaataacggctgcttctttactacttatgacactagcctcaattcattcttcccatcttctacgtaaggactattaagatactcagacatagacttgcctcattcccagagaagcctccaatcccaagcaaagccctgcttctttgaactctccccaaaccacctaacacaagccgcaatcctgtaagtcctctctaatattgtcttcccgagatgttccgtgattctttgtggtgagcattctttctcattgccgtgagcgatgagcccttcctgttcattgtactgatgtgttcctggtggtctttgggtagagagccttgacagaaaaagaaaataaatttcagtattcatcattcataatacggggaaatagtaatgaaacttttgtttcagtttatatctgtgcatgtatgtatgttcgcaggcatatggagtatggaacatttaaaactgtttcttatgttaatcacaataaaactagtataaccactgacccagtggtcaacagctggaagccaggatgcccacagactccactccagcccttgcttgtttgtgtgccctttggcaagttatttcacttctctttccctcagtttcctcattcattcattaatatatttaagaaatatttgttgagcaccttccatgtatcaggcgctgaagattcactaatgaacaaaacagacacagctccctgcccttatgcagttgatattcttgaaagggaaggtaggcaattaaaataaagaaataaaatatattgtaagatgtcagtaagtgccatggaggaaaatagtggagaaggagagtaggggtgatttgcaatttataaaggagtggtcagtgaaggtcccactgaaaaggtgacatttgagcaaagacttgaagaaggaggcaagggagcaggttctgcaggaatctgaaaggagagtgatccacatacagggaacagcaggtgcaaaggccctgaagagggagcctgtctgcagattcaaagagaaataaggagatcagtgtggcttaaagggatgagagaggggaagagaaactgaaggcccaaaaaagatatcaaagtgctcaatcttgaagggcttgtgggtcattgtcgggacttcaactctgctgagagagacaggaaccaatggagagcttgagaacaacgagtgatcttagattttaacaggatccttctggcttccatgttgagaatgagccctgaggatatgcgggggtgggggcacaggggaagtgaaatagggaacccagtgagcatgacagcatctagaaaatgaaaggggccatagtacctcccttaggtgtatgttaggaggcataagcacttgaatacatacaaagattttattattgttgtttgtgttatcccaaatctaatagctgattggacaaaggagagatgaactctggtggcagggccgaggcaggaacatctcagaagacaatcacaggcaccccaaccaggaggggccttaggaaaagcacaaggcaggaaagagatatgtgcgacgtcggggcaggaggttgtggaggtagagtctgatgcagccagtgcaaagagtaactgagctgtgagggggtggggggtgagctggaggagtggaaagcaatgggatcctgcctagttccttgtccaagatgaaggagcttggacagatcataagagacaatggggcatccagtggagatttgggagcagatgtttgacaagatgaagcagcagtttcttggaacatccctttgcttactaaagcatctcaccagatatctaatcaatcttccacatggcaccagaatgatctttccaaggtgcaaatctgattacatcacagctttgcttaaaacaatatttggctgactacggcccttaggataaaaggcagactcttcatcccactccaagcattggtggtctgccgactatgggcccctccaacctcattgccttccccacacatctgctttctctcaaattttagaagtcaccatgcttcctcctgtctctctgcctagcgccatagctgctggctagaattcaaggctgcacacatcctggtgttttaagctgttgcttatagtactctggcaaatagttttgctaatctaactacttgagtttaggtgttctctgctcctgggactcccaatgcctctcccttagggttcatctcaaagcttgacccaaaaggtttgaggtctatctgcttaatgccagtcttctccactgggctatcaactgcatgatgtcagggccagtgcgtatttgatggactgttgggtctgtagcatccagcacaatgcccagcacgtgaatgaatgaaccctgaataggggaagaggatgcttgggctgagactagatccaacactcaactctttcctggagacactcatccaatttaagactcagcctcagttccgccttctggaggaagccttgcttgtgccccttcagactaggccaagccctctgttagtgttctttcagctcccatccttctccctgatagcatgtatcaaagcaagaattagttatgtggactcacctacttaggtgtcacccctggaacataataagtaacgatgattgagctctcatgttacgaggactctaaatgacaggggccattatcctcacaatcacgccacaggcattattcccattctgcagagcggggaactgagaggcagagaggtcaagaaggcgggccaggaacagtggtcacgcctgtaatcccagcactttgggaggccaaggcggacagattgcttgagctcaggagtttggggcaacatggcgaaacctggtctctaccaaaaatacaaaaaattagctgagtatggtggcatgtgcctgcagacccagctacttgggaggctgaaatgagaggatcacttgagcctgggaggcagagattgcagtgatccgagattgcgccactgcactccagcctgggtgacagagagacactctgtttcagaaaaaggaaggtgcttcagccagtagatggccaggttagaatctgaatccatgtcagctgcccccagaggacctcctcataaccattgagccatacagtctcaccgcaccatgcattgagggcaagcccacatctatatactcagcaccagacaccagcctggcatagagattatacagtccatcctcaacacttgtggattctgtatatgcacgttgctaatatttatttttaaagccaaaatctatactctgcactttcttggccattcacagacatgcacagagtgcggaaaaattgtcacctgacctgacatgcatattcccagctgaagctgaacaggcaatattctgcctcttcatttcagctgtcatactataaacaaataacctttctctgttcatttaaaactagggttttttttgcatttttgtgctttttttgttggtgatttctctgtttaaaatggccgctgagcataggactgaagtgctgtctcatgttcctaggagcaggaaagctgcgacacgccttacactaaaaatatgtgttaggtgaacattcaggcatgaactatagcgctgctggccacaagttcaatattaatgaatcatcaatatatattaaattatgtttgtttgttttgagagggagagtctcgctctgtggcccaggctagagtgcagtggtgcaatctgagctcacggcaacttccacctcccgggttcaagcgattctcctgcttgagtggctgggattacaggcacccgccaccacgcctggctcattttttgtattatagtagagatgaggtttcaccatgttggccccagggtggtctcgagctcctgagcttaggcaatccgcccacctcggcctcccaaagtgctaggattccaggcgcgagccaccacgcccatcctaataatgtatctttaaacagaaacgcacatataataaggttatatactgatcaactgatgaataagttgggaccagaggctcacaggaacctaaacctgtatttattttccctaagggcaatgggccagttctcattaattcaacctttgcagtgattttacagaacttaatgaccaagaggctgggcaaggtgcctcacacctgtaatcccagcactgtgggaggccaaggcaggcagatcacctgaggtcaggagttcgagaccagtttgaccaacatggcaaaaccccatctctccaaaaatatacaaagaaattacccaggtgtggtgatgtgcacctgctagttccagctactcgggaggctgaggcacaagaattgcttgaacctgggaggcagaggttgcggtgaattgagatcacgccactgcacgccagcctgggtgatagagtgagaccctgtctcaaaacaaacaaacaaacaaacaaacagagaatcgccggtatatgataaatagcagctggatgaacaaatgactggccgagaatgaatgggaggacaagctcagagtgggtgagaaacaggaggccgtggcctcatctccctgtcctctccccacccagggatcagagtcaccaaggtggactggcagcggtcgaggaatggcgctgcccaccacacccaggagtacccctgccctgagctggtggttcgcaggggccagtcgttcagcctcacgctggagctgagcagagccctggactgtgaggagatcctcatcttcacgatggagacaggtaactgggcttgccagcaccctcttctcgtctgcagctggagggacctgtcttatgactcagtaacataagaccttgcagtcagcagctcaggctctgggggaagcaagtcactgtaggtagacggagccttgaaccctggaggcttctggtggcagctttctgggggtggttgggaggtgctgccagcagacagtgggatggatgggatgacctctctggaaccctgtgtgtaccagacacccagggctctggaagggtatgaaaacccgtcaagcactttgaagcccaagcttttctttcctttcctggcccgacataggcagactttggtttcaaaggatgctgtcactttctccttggcctggaagtggctgggatgtcagggcagctgaggtggaccctcacttggccactggccttcttgctctttgtcaggtccttctcccaaagcctcccagaagttcagggggtgaaggtggggcttccaggcctgtagcttttttcacttctctaaagctgggtttcccaggggaagggtctcctgattccctctcctctcctccaggaccccgggcttctgaggccctccacaccaaagctgtgttccagacatcggagctggagcggggtgagggctggacagcagcaagggaggctcagatggagaaaactctgaccgtcagtctcgccagccctcccagtgctgtcattggccgctacctgctgagcatcaggctttcctctcaccgcaaacacagcaaccggaggctgggcgagtttgttctccttttcaacccatggtgtgcaggtaggagtggccaagtccaatgcagaggtttttccaaaagacatccttagaggagagcctgcccttggagggggcctgggaggtgggttaaaggacaagaagctgaatgccaagagctgggcaagaacttagcctaggcagaggtaggcaatggtcagagaaacctggtagcaggtgcttcaaagcctatgccagaggacccagtgggcaagagaggcccaggggtgggtaagagccaggacttgggaatcagactgccttggtttagtcccagctgtgctgagctgctctcctctaccagtctccatttcctcatctgtaatatgggaaaaataacagtgcctacctcttatgactatggtgaacacccatagggctaatacttgtaatgtatgagatacatcataaggccttagtaaggggtggccaggatcagtattattattaatatttaagaaatatggccgggtgcagtggctcacgcctgtaaccccagcactttgggatgccaaggcagggggatcacctgaggtggggagttcaagaccagcctgaccaacatggagaaatcccgtctctactaaaaatacaaaattagccagctgtggtggcacacgcctgtaatcccagctactcgggaggctgaggtaggagaatcacttgaacccaggaggtggaggttgcagtgagccaagattgcgccattgtactccagcctgggcaacaagagcaaaactctatctcaaaaaaaaaaaaaaagaaaagaaaataagaaaaaaagaaggaaatatgagaaatatgaggctactactgacatcaaggaggcccacccaaagctgtcagttcccataaaactcttttgggattggtccctgcttggttaaagacttgccaggagggatggagtttggcagggaggcagcacgggagctcgcaagccccctcttgacctctcctgccccagtcagcctccgggcgctgccctgctgctgatccctgatgcagccccttccccaggccagcaaggccagagccccagtccacaccgggcctgatgactgcttttcagaggacgatgtgtttctggcctcagaggaggagagacaggagtacgtgctcagcgacagcggcatcatcttccgaggcgtggagaagcacatacgagcccagggctggaactacgggcaggtctccaggggcacaggccagacaaggatgtgggctggggcatggggaggtcggtgggactggagtccctctgtctgctcactcttctcaggagggacaaggggggctcactcctagagaaaacccactcattcattcattcatctactattcactgggccagggcctgcactgggtcctggggaaggggaggtgctttggacaaggtttggacacagaacaggtcagtatggttgtggaaaaatgaatagctctgatcagtggttttcaaacacgagcgtacatcagaatcccaggagggatggcgtgctggaccccacccccagagctgccgactgagtaggtcttgggcagggcctgagaatgtgcgtttctaaccagttcccaggtgatgctgatgctgctggcctaagaccacactttaacagccactggcttagataagtagttccaataccaggtgcaataggggaaggaaaaagtcagaatgatagggatggaagcaaagggagtccagaagagggtgaaaggaacctccacttcggccattgtggaggcttacgtgatattgtagttgggtctctacagtgaggcaggatctgcccaggcagagggaagagcaggcagagccgcacggacgtgggaagtagggagtcttgagtctgctagaggaattctgtctgcctgagctccaggtccccggtggaagaaagactggacttgactgtcaggctgaggagtcacgcactgccctgcaggccaggggtttaaaggctttgggattcgggtgctgggcagggaagttatagtgaagagtttagggtccacctaaggggtagccactactcagcacccactttttgttgccagaccttccaaattatcagagaccagaaacctaaatgtgtatgcaaaaattccccaatttttaaatgttgttaactaattcaaatgtgtttgaaaacatcatgtagaccaaatgagcatatcagcgaggtggatgtggctcgagagcctccgattttagctcagactttattgtgggtagtcaggagccacaggagattgttgagcaggggagagacatgattaaggctgaggttctgattccccaggtgactctttgaggaagggtttccaagactagggggtgctctgtgatgcccctggtggttggagggggcagcaaactgccctgcacagatggggtgactgaccgggtgagggctgtgggagggcctggaatatgggtgactgaacgcagcctctaagcacagcctctctggggagcagtttgaggaggacatcctgaacatctgcctctccatcctggatcgaagccccggtcaccaaaacaacccagccaccgacgtgtcctgccgccacaaccccatctacgtcaccagggtcatcagtgccatggtgagaagcccctccatccctgcacatgtacttcctcaaggatcccccagccaaccccggggccacaacctgtgattcttcccatcaccccttgttttaattcgctgttgttgcagaaccaaccaccccaaaactcagtggtgtaaaacaaccctttattatgcttactgttttttagactaggaatttgggcagggcaccatgagaatggtttggttccactccaagatgcttcttctggggatatcttaatgactgcatatgtctgggatggtttaacaggacctctgtctggggctttggttctggtggttggcagttcctaggttgccatccatgtcatgtctcctggaactggaatgtccaggatggcttccccaccctcatgtcaggttctgggctggggtggctggagcagctgggacccaccagtcatcactctttctacacaacctttccatgtggctagcttgggcttccccacaatatggcagtttcatgcatagcaatggctccccacccccacctccctgccccaagcaattcttccaagaaagaggaagtggaagctcccagtcttataaggtctaggcctggaaactggcacaacatcaattccaccatagtcagtggtcaaattagtcacaggccagcccagactcaagaggaaccctcttcttgagtgggacatagacccacctctccgtgggaggcatgacaactttaacctatcacaggcctcaggctatggtgtttcctcccaaaaggtgtctgcagggcccaccacctccctctaccacatgcaggtattaaggtcagtgggtgggtatctgagattccaaaattgcacaaagctatatttctcctatttgatactctcaattcctcaagacctcagagagcagttggagcacagagaattaacatgagtgacaatcccaaacagcagagcatcacagccctgaggacagtgaaagtcctgaactcaaggctcccaagtccaagtcctagactcatggatcaccacttggactaacttgctgtgtgatttgggcaggtccctgaatgcttctgaagctcagtttttgcatctgaaaaaaaaaaaaaaaaagaataatgaaacctacattgtaaacttcaacaggttaatatagtgtgcacaaaattcttggcatagtggtgtctggcacacaatgagcatttaataaatgttagctgtccctataatgattatgccaacagtcccccaaaacagatcatttaacataggaaatgctctaaagttgtaatgatttttacaacacagtatccaaatggaagataattgaaaatgacaagtgctaccaggaagtaggtattttaaggcaacagatgcccctaattttcagacagttaaaaagcaagagtgaccccgatggacctggtggtccaaagttggacaggatttgaccacgatgcggttcttgaggtaggaagccctgcctggttgtggacccgtgccctcctctgcccaggtgaacagcaacaacgaccgaggtgtggtgcaaggacagtggcagggcaagtacggcggcggcaccagcccgctgcactggcgcggcagcgtggccattctgcagaagtggctcaagggcaggtacaagccagtcaagtacggccagtgctgggtcttcgccggagtcctgtgcacaggtaccctgggagagaagggccccagggtacctgtgcccccagcttcctctatctaaatgtatttacatatatttgcatatgctgcaacccatcttcattgatggattcattgacagggagaacgaagtctggctgatgaagagagaagccagagaatttatttccttcatatctgatcttttatcttgaaggagtcctagctccctctgtctctcattcattgagtgccttgggcgagccctgcggctcccttggcctccagtcccctcaggaagatgagggctctattaggtggcttccaagttcctgccagcctcaaagcctgtctacttacatgaggtggcaacagcatatcctgaagtccttgagagaacgtgcaggagatggtggcatttctgagagtggagatgggagtctcagccccacaacctgatgaactagacacacagacaaagatggggtggcagagggctttggccacaaatgagccagggcgcctgctgtggaagccaggcccctctctcaggggccagggtcccgcctgctccgagcctctctgctctgcagtcctcaggtgcttggggatagccacacgggtcgtgtccaacttcaactcagcccacgacacagaccagaacctgagtgtggacaaatacgtggactccttcgggcggaccctggaggacctgacagaagacagcatgtggtgggtcctgcccccagcctaggcccgagggctctggaagcccagcaggtggagcaaggcctcatcttccataacaccaccagggagcggcaggcccagagcccagctctcctgaatctgagccggctctggagggagtgagaggcgccctgcggatagtggtgcctcttccaagatgtaaggtctgaggtcaagagatgtagactcagaggtcaggaggggcctcaagatttgattgccttgaacgcccggttctactctgtctgggaatctgtggcttcctggggtggggtggggtgggaactccttctgcacaggtacctctggatcaggctcctgcttccgtatcagctgcggttctccgtgttgtgtgtctcaggtgggaaacagactccttccttagctaaaacaaaattcttcacataaagctttaaaaaattcattccaggccaggcacggtggctcacacctgtaatcccagctactcaggaggctaaggcaggagaattgcttgaacccaggaggcagaggttgcagcgagctgagatcacaccattacactccaccctggtcaacatagtgaaaccccatccctactaaaaacacaaaaattagccaagcatcgtggcaggcgcctgtagtcccagctactctggaggctgaggcaggagaatcgcttgaacctggaaggcagaggttgcctctgtgagccaagatcatgccactgcgctccagcctgggtgacagagtgagacttcgtctcaaaaaaaaaaaaattcattctaacttacttaattttctgaaataggaaaaacattcatgtggtttaatatttgaaaggtacaaaatgggttgcagtgatgtctccctcccgcccagttccccagcctccccatcctcctcctggaggcaacactatcactgtctgctacatctcctgtcagagagatgctctgcagacacgagcacatacatacctacagtgcctccccgccttttccctgcttaaacagtattggcagctttatgtgatactgttcttgctggaacatttaacaattccacgtaaatacacagagttttccttattttccataatgttttaagtaataacgtaacacccaccaagcacctagtctgtgccaggtccagttctaagtgctatatatagattaactcatgtatttcttcaaacaacctgtgaataagttaagatcattgattctatttcgcagatgaggaaactgaagcacagagaggttaagtaacccatccaaggccacacagctagtgagtggaagcataagggtatgaacccagtctgcctctcaattgcatgaaaaagccattgttcatctaaccatcccatatggatggacatttcagttgcctcagttaaaaacaagtttgcctttacaaacaaggcttcagtgaataaccttgttcaaatgtctgttcacacatgtgcaagtctgccactcaaagccaactttctaaagattaggagagatggctgggcgcggtggctcgcacctgtaatcccaacactttgggaggccgaggctggcaaatcacttgaggtcaggagttcgagaccagcctggccaacacggtgaaaccccatctctactaaaaataaaaattaaaaaaaattagccgggtgtggtgacacacacctccccagctactggggaggctgaggcgtgagaatcacttgaacctgggaagcggaggttgcagtaagccaagattgtgccattgcactccagcctaggtgacagagcaagactctatctcaaaataaataaataaataaaaattaaaaaataaagattaggagagacagtgaagaaaacacaacacagagacacagagagccttgtatccttgttccccaggggagcgtgccaggagcccttcccgagctggcctccagctcagaccatctctttgctccccttggcctctcctcttttttggttctcttcattcccttgccctggaagcacaaaatactcgcattcttctcttttcttcatgcagaaagcacagacacttcattttgatgttggggactctgtcaccacccaggttatcagggtcccacctttaatccccaaatgctaatcaacatactttccccaacaaaaacagttgcctgccgaagaggagttctgaggccggctgtaaagatgccaagtcaggcaaaccgggaatcaggtttctgtctgctcctttctttctgcaagaccttgagcaggtgatgtcatgtttcctactcatattctcatctttaacacggggaattaaaaataaggctggaattaccagagtctatggtgctctgcataatcagaaccctacctaccccctctgctggccatatcccagagatacttaaatactttctgctccttgaacacacaaggccttttcttgtctcacttaggacctttgcacatgctgttccttctttctagaatattgttcccttcactcttcctatagcttattctttctcactgaagtctcaccttcaatgtcatttacctagagtaggtctataggggttgttctctagcttaagcccctctttttcttcctaacatttattgtcacttgcatttgtttgatttatctgctgacttagctttgcctgtctcctttgttagaatgtaagcagcatgagagtaaagatcttctgtcttagttgcagtaccttgaacaacaggttcttgataaatgtacacacacatctatatacacacatacacatatatatacaaacatatgtgaatgctgtgtgctcattcatgtggttgaatgagtgattcacaacatgcagccacagttcttgtggaaagtagggagcccagggcctgcctctcagtaggatcttcccttcctatgccctcactctaggcagcttcacccatcctctctctgtggcaggaatttccatgtctggaatgagagctggtttgcccggcaggacctaggcccctcttacaatggctggcaggttctggatgccaccccccaggaggagagtgaaggtacgctcaattgggtggggtaagttccagacccctgcttttccttacccatgctgctcatgcccacccctcctgcccaggtgtgttccggtgcggcccagcctcagtcaccgccatccgcgagggtgatgtgcacctggctcacgatggccccttcgtgtttgcggaggtcaacgccgactacatcacctggctgtggcacgaggatgagagccgggagcgtgtatactcaaacacgaagaagattgggagatgcatcagcaccaaggcggtgggcagtgactcccgcgtggacatcactgacctctacaagtatccggaaggtaagggccacatggcggcctttattaccttcccccggatggcccatcagctgcagagggcccactgcaggtggcctggagccaggcctcaccccatgtatatgacgctgacagcagcttccattcacgttgtctctgtgctctgagccaagtgcctttatttaggctacattaatagcttcctctgtttgctaagcacctcttctaccttagaagatttcccatttgtaataataatagctacatctccttgaacacttgccatataccaggcactgcattaggtatgttcacatacaataatcactactagtaacaataatgatgatagtagcaggtattatttattgaacacctaggacaaacgcatggcacaggcccaattcagactaataataatagcatctcctgtttagcatctgccagggcctgtgccgtgataccaatttatggccattggttcattgaagagcccctacttgttaggctacaaaaacaaaacagttgtattttttcttatagctgtttccaactatatactttaaaaatctccctttcccactgtgtaacaggttccttagcaatgttatgatctgattaacatattttcaaccatttctgcttgttaaatccatgtcaccaagtaattatgacttcaagctcaaacttgaattagaccctgtctcctcctgtcccctgagcacaagctagagcagtgaccctggaaggttgctaaagaggagacacaatctgctctgaacacctcctcgcctcccttttctgctctctagcatcatattttacagctctggttgcacttttttttttttctttgagacagaatctcactcttgttgcccagactggagcgcaataatgtgatctcagctcactgcaacctccgcctcctgggttcaagcaattctcctgcctcaccctcccaagtagctgggattacaggtgcccgccaccatgcccagctaatttttgtatttttagtagagacggggtttcaccatgttggccaggctgcccttgaactcctgacctcaggtgatctactcacctcagcctcccaaagtgctgggattacaggcatgagccactgcacctagccccttgttgcacatttgaattatccagggagctgtttcagttatatatcttaaacaataattacttatttggtcaattctgtgggtcaacaatttgggctgtgctcagctgggatggttcatcttctccaggtggtgctggctgggatctcacatatgtctgtcacgtgggactgctgagatggctgggtctgtgttcccactcggcctctcatgtcccaacaggccagcccatgcttttctgaatagcagcaacattcccagaaggtgagagatgaagctgtgaggtttctagaggcctggctcagaatgtgcaccatgtcacttctgccacattctattggtcaaagcaattcatgagcccaatccagattcaaggggtgggaagttgtaaggcattatggccatttttaatctaccacagcaggccagattccacccctgactaattgaatcatagtctctacgggatgtggttttggcactgggactttttaaagctcccaggtggtctctagtgtgcaaccaatgctgagagcactgttaggctaagagggaggcaaagaggacagaagagagcagatgcctttgtcttaactgggtgaggattcagtgctggctaagtgggtgggtgctgctgccctagtttcctatctatgcttgctgaggacagatggtggctccatcacaacctgctgccatccagactaattcctgtgctgttcctctagacactgctgatttcttgtgctatttgggtcctttcaacacagcttctttctgatgcatggtgatttttgtccccaagttctgcagaggttttacaaggctgtggcccccaaccctaacctccactgtgtcccactccaaggctgggaactgaaacctgacacttgtgggtagaaggagcagtcttgactggctgtctcccacctgctgtctcccttcaattctcttctccctgctcaggtagtacatggcttagtaagtaagacgggataaacagacctcccacagggaggagaataccaacttccctttctgtaggcacccccaatcttgatcagccagtcatttcttgctgaagatacccccaaaccttaacactgattcttttaaacacctactcacacccccaactcacactttagctcctatctccaggaacatggcactttcttgactgtcaaagacatcttccactttagctgtcttcttactgtcttggggatgggctatggatgaggggactatgtggtaaggcctcttctgagctgccacctctctgataagacctgcagattgattgctgggtcccttcagctgggagcttctggaacttagaacgtggggtctagcctgggcaacatggcaaaaccccatctctataaaaaatacaaaagaattagccaggcatggtggcatatgcctgtagtcccagctactcaggaggctccagtgggaggaatgcttgattctggaaagcagaggttgcagtgagacaagattgtgccactgcactccagcctgggcaacacagtgagaccctgtctcaaaaaaaaaaaaaaagtacatgaggtctgtgggtcttttgtcctaagatttaactatgaccagctgggtgcagtggctcacacctataatcccagcactctgggaggccgaggcaggcagatcacctgaggtcaagagttcgagaccagcctggccaacatggcgaaaacccgtctctactaaaaatacaaaattagccaggcatggtggcccatgcctgtaatcccagctacttgggaggctgaggcaggagaattgcttgaacctgggaggcggaggttgcagtgagccaggatcgcacactgcactccaccctcagcaacaagtgcgaaactcctcaaaaaaaaaaaaaaaaaaaaaaaaaaaaaaaaaaaccatggccacaggagaaattaacatcctgttacatgataacagtgatgacaatcactgttactgagcgctggctgtgggctggccattttcacatgttatgtagtcattttatttaacaaatgtttacaaagcccttaccatgagcttttaagtgagacactagtacaaagtttattttacagaggagaagacagatgtacagagaggcaagttgacccagccagagaacatagctagtaagggagaactctcctgcagaacccagagcccatgctcctcactctgcactgcactgccactatttaattataatattgtctactgtttattgactgcctactgtgggcaacgtgattttacatttaggttaacaaaaataatagtaacagtatctagaacttgctaagcaaaatggtaagcaatgtccaagcattatttcatttaatatttattttaaaatcattttatgagccaggcatggtggctcacgcctgcaatcccagcactttgggaggccaaggtgggcagatcatctgaggtcaggagttcaagactagcctggccaacatggcgaaaccccatttctactaaaaatacaaaaattagctgggcgtggtggtggttgcctgtagtcccagctgttcaggaggctgaagcaagataattgcttgctgtcaggaggcggaggttgcagtgagcagagattacgtcactacactccaggctacagagcgagactctgtctcaaaaaataaaataaaatcattttatggataagcaaactgaggtacagggaggttaagtaacttccccaagtttccaaagcccagaagagctggaattctaacgaggcagtctactcttagggcctctgccctccctgctatgctagactgcacatcttcgctgagtggccttggtgtgccatacagcatgctaggctttttcatgtgctctcaaagtagagaccctcctgagtgtcaggcatgattcagaggcaaggggacaaagagaagtccccagagaactcaccacatggtgagctgacagcacagaataattcggagtgactggcactctactggggcatccagaggctaaaggaacaaagaggaggagtctctaattcgaccagggcagaaggtatcaggaaaagcagcctatgggagggaatgctgaagggagtaagatttagccaggagatgaaaggttgagaaggcattccaggaagacagagtccaacaggattccagactcatgctgggcaatattgctcaggcaagccaagacatccttgacttgcatgagcagtattctatagatgaaatgacaggggcttgtgcctctctgagtcatgagcccttgctctgtctgtggaaccaggacacatgctagagctagagcacaaagattcagagcccctgggtacaacatgctcttttatacctaaaggacttggcacaagatgctttctttgcctgggaaggacctgctgacttcaccccaaacttttgcctggccaggggtctcagcaccctattgacttccttctaagcacatatcgcaacttgatatttgcttgaatctttgttgtctccctagaatgctcctagactgagagttctaggatggcaggaagcctgactgttttgttcattgccgtatccccaactcctacagcagcatcaactgcatagtaggtgctcagtacagattcacggaatgaatgaattggggccaacagcatatgaagggcttttaatgccataaggagtctgagctgtatcaagaagggccttgttttgttgattgcaggactggcttatgtgaagctacaggacatataagccacattttcacatttttttctattggcatgtgtttattgagcatttactgagtgccaggcaaccagtgaacaaaatgcgtatgatctttatcttaaaggataaaggagctgacattctagtggggcaggtaaaagtaaacaaataagtaaaataactagtatttcagatactgataagtattttggggaaaaataaagaagggaaagagtttagggactggttgagaggaagcgaacatttgtcatttaaaatcaggtagactctaacagacgcctatagaagactccacattatagcagcaacatatacacattcttggaaagtagaagggtagcattatccagaattgaccatatgctcagccataaaataagcctcagtaaacttaagaggattgaaatcatacaaagtgtataatcttattccaatagaattaaattagaaatcagtatcagaagagaatttgatacatttataatatgtgaaaattaaacaatacatacgtctaaatatccagtgagccaaaggaaagatcacaagtcaaattagaaaatactctgcagtgaaagaaaatgaaaatgcaatatgccaaaatttataagatgcagctaaagcagtacacagtggggaatttatagccgtaaaacctatattaaagaagaaagatttcaaatcaatagcctaatcttctaccttaagaacctagaaaaatggctggatgtggtggctcacgcctataatctcagcattttgggaggccgaggtgtgcagatcacctgaggtcaggagttcgagaccagcctggccaacattgggaaaccctgtctctactaaaaatacaaaaattaattgggtgtgggggcatgcacctatagttccagctactcgggaggctgaggcaagagaatcacctgaacctgggaggcggaggttgcagtgagccgagatcaggccactgcactccagcctggatcacaaagcgagactgtctcaaaaaaaaaaaaagaacctagaaaaagaagagcaaactaaacacctaaaaaagcagaaagaggaaacaagaaagattaaagtggaaataaatgttaatgaaataaagagcagaaaaatcataaaagaaaatcaacaaaaccagttgattctttgaaaagactgacaaaattgataaacctttagctagactaagagaagaatcaaattactaaaattagagaggatgtcactaccaaccctacaaaaatgaaaagaactatagagtgtggtttttaaagaaaagtatttggttatcatccccagtttctggcacacagctcctaaaactcttggagtcttcagaatgagaagagcatcagctatatagcacattagtgagatgactaggggcatctagatcactttcagcatgggggctggttgcctgaaaaatcaaggcatgattagggattggggactttaaaccccatctctgacctccagggaggggagagaggctgaagattgagtttatcacctaaggcctatgatttaatcagtcatgcctatgtaatgaaactctgtaaaaactgctaaacaatggggtttggagaggttccaggttggggaagacattgaggtgctgagagggtggcatgcttagagaggagatggaaaccccacaccacccctgccccctgccataccttgccctgtgtatctctcccacttggctcttccagagttatatccttcataacaaaccaggaatggtaagtaaactgtttttctgagttctgtgaacccctctagcaaattatgaaacctaaggctggggccagttatgagaaccccaaatctgtagcaaagttggacagaagtgtgagtaaccccgagtaaccaacacttgtgactggagtctgaagtctcagtcttgtgggactgagcccttcaacgtgtggagtctgatgctaactccaggtagctactgttagaattgaattgaactgaattgaactggagacccagttggtgtccagagagttggagaactggttgttatgagaaacccccacacttttagagtcagaattgctataattaatgacagtttattaggggatactatgagcaactgcgtgacaacatattagataactttagattaaatgggtaaatttctagaaagacactttcttaccaaaactatctcaaaaagaaatagaaaatctgaatagattcacaacaagtaaaaaactagtaatagttcataatgaactagtaatatgaaaacttcccacaaagaaataatcaggcccagattatgtcactggtgaattctaccaaatattaaaagaactaatatcaattattcatgaattattccaaaaagtagaagatgagggaatacttctcaactcattctgtgaagtcagtattatcctgataccaaaaccagatgacatcagaagaaaagaaaactacatatctatctcccttatgaatgtgaaagcaaaaatcaacaatgaaagcaaaaattcatgaatatggaatgaattcagcttactgataaactgaattcagcaacatataaaaaagattatatgccatgagcaagtgggatttatcccaagaatacaagatgggtttaacattgaaaatcagctaatataatacaccgtatcaatagaaaaaaggacaaaataacatgatcatctcaatagatgcagaaaaagcatttgacaaaatctcatacccctttatgataaaaaaaaacactcaacaaattaagaatagaagtaaacttcctcagtctgataagtcacctataaaaaagctacagctaaaatgatacttaatagtgaaacgttgaacatttacaccccaaaatcagggacaagaccaagatgtccttttttgtcatgttgattcgtcatttttatggaagtactagccagggaaattaagcaagaaaaagaaatagatatcttttttaaaattgtattgggaaaactggatatctatgtgcaaaagactgaagttagactcttacattatatagaaaaattaactgaaaatggatcaagggtctaaatgtgagagctaaaattataaaactcttagaaaaaaacataggagaaaagtttcatgatgttggatttggcactgatgtcttgaatatgttgccaaaatattaaaaatagaattatcatacaatccagcaattcagcttccaggtatatgcccaaaagaattgaaagcaggacctcgaagagatatttgtacacccatgttcagagcagcattattcaaagtagccaaaacatctatagccataccaccctgaatacgcccaatctcatcaaaatggccaaaaggtgaaagcaacccaagtgtccatcactgaatgaatgaataaacaaaatgtggtatatacatacaatggaatattatttagccttaaaaagaaagaaaataccaacaaatgctggaacacagaagaaacttgaggacattatgctaagtgaaataagccagacataaaagaacaaatattctatgaggccgcttatatctatgaagtacctagagtagccaaactcatacagacagaaagtagaatggtggttgtcaggggctaagatctggggagaatgggcattattgtttaataggtatagagtttcaatcaagatgaaaagagctctgggtagatggtagtgatggttacacaacaatatgaatgtacttaatgacactgaagtatacacttaaaaatggttaagatggtaaattttatgttatgtattttatcacaatttttaaaatagaaagaagacaaaagaagagagggaggaagacagggagggagaaatggaaacagagaaatttccaaattggaaagaaatttgcacatgacataattttgtatatataaaatcctaaggaatccattaaaaagctattagaaatgataaacaagttcagcaagtttgcagaacacaagatcaatatacaaaaattaatcagatttctagatactggcaatggataatccaaaaatgaaattaagaaaataaatccatttacaatagcatcaaaaagaataaagtacttaggaataaattcaacaaaagaagagcaagacttacatgctaaaactacaaaacattgttgaaagaaattaatgatctaaataaatgaaaaggcatcccattttcattgatcgaaagggtttatattgttaaaattgcaatactctcaaaattgacctacagactcaacaaaatcctatcaaagttacagctgagtttttttcccccaaattagcaacctgatcataaaattcatttggaaacacaagggaaccccaaatagcccaaataatcttgaaaaagaagttggagggctcatacttcccaaattcaaaacttactacagccaggcatggtggcttatgtctgtgatcccagcactttaggaggccaagtcaggagactcccttcagttcaggaaatctcccttcaggccagctgggcaacatggacgacttcatctctacaaaaacttttaaaaattagctgagtgtggtggcatggctaccagctactcaggaggctgaggtgggagaattgcttgagcctgggaggttgaggttgcaatgagccatgattgcaccactgtactccaccctgggtgacagagtgagattctgtctcaaaaataaacagacaagacaaaaattacaacagatatacagtaacccagacagtgtgatactggcatgagaatggacatatagatcaaagaaactgaactgagagttgaaaaataaacccttaaaattatgatcaattgattctacaagcgtgtcaagacaattcaatggagaaagaataagaatagtcttttcaacaaatggtgttgggaccactgtacatccccacatgcaaaagaatgaagttgttataccccactggttacatgaaaaatttttaaaaaagggaaataaaaagaatgaagttggcctcctatctcacacgatacacaaaaatttctcaaaatggtttatagacttacatgtgagagctaaaactataaaacttttggaagaaaacataggagtaaatcttcatgatcttcggttagaccaagccttttcagaaacgacatcaaaagcacaagtaacaaaggaaaaaattggactttatcaaagttaagaacttgtcctgcaaacagcaccatcaggaaagtggaaagatagcccatggaataggagagaatatttgcaaatcatgtattgaatggataaagcactctcatctgaaatatatgtatatgtaactcttaaaactcaaccataaaaaaaaaataattttttttgagagcacctgaaagtccaaggcatgaaccaccatgcttggcccatcctagcaccttgagaggccaaggcgagaggagtacttgaggctaggagttcaagaccagcctgggcaacatagcaagactccatctctacaaaataaagaaataaataaataatccaattttaaaatggcaaaggatgtgaatgaacatttccccaaggaccatacacaaatggccaataagcacataaaaagatgcttaacatcattaagtcattaggaaaatgcatgtcaaaaccacaatgagataccacttcacatccactagaactaccgtcatcaaaaagatagacaattagtgttggtgaagatgtggagaaattgaaacactcatacattgctggtggaaatttacaattgtgcagccactttggaaaacactttgacagtttctcaaaatgttaaacatagtgttaccatgacccggcaactgcactcccagctacatttccaagagaaatgaaaacaaacacccacacaaaaactttacatgaatatttatagaaacactatttaaaatagataaaaagtagaaacagctcaaatacccatcaatagataaataaaatgtatatccatccaatggaatgctagtcagaaataaaaaggaacgcagtactgatacatgctacctacagtgtgaacgaaccttgaaaactgatgttaagcggaaaaatttcacaaaagaccacgtgttgtatgattccctttatatgaaatgtccaggataggcaaattatgaattatattagtggttgcctagggctggggttggggtggggaggaatgggaagtgactcctgatggttacagaatttgggggggggggtgaaaaaacgttctaaaattagattgtggtgacggggtgcacaattctgtgaactactaagaaacattgaattgcactcttaaaatgggtgaattgtgtgttatggaattatatctcaataaagttgtttaaaaaatcaggtggtcagagaaggcctccatgagaaggtggcattacattctttggcagggaaatgaaacattttcatagtaaaaatatattgtacagtagcagaactcacatacattttaataataaaacatggaatgttaaagaaccttggtgttcacagcaacatcaagtgaccaccaagtgatcagaccagggtcacacagtatcagggtaccttcaggggagagtggtgtgaagaccacatgccacaggtttcaaatagggaaggagaaccatcagaattggactttggaatcatcagagtggaaacagaactggaatgggatggatcctacattcccaggaagggaggggatgttcttgattatcctgctcagtgccttgcttgtgggcctcttgtccccactttacagataggaaaactaaagcttgccgggacagattaatgaaaacagtaataaaagttcacacactgacctcatggtgaggcagtttgtatggtggtttgatgggggaagagaggtgagagaagaggacagattccagagcctaaggaggatgctcagcaggacctggtgagggctctgttgtgagtgataaaggtgagagaagagtcaagaacactcccaggcttctggcttgtacacccgggctcatggctgcaccattggctgggatgaggaatgctgctgcgcagttggtgggtttggttggatttgaggcacctgtgagacacctggggggcgctgtccagttctttgtattgttctggagctcaaaagagaggtctgcactagcagtggggaaagtggtgtatcaggggccctaaactcacatgtctacaggagccccaccgatagaaccccatgagtgagaattacagggtgaagaccatggacaacaagagagtgcgttccctctagggggggctgctattgctcaactctagactgaggtagggcatgcaggcttagcccaggagggttcctggcatcacccaggaaagaattcaaggatgagccagtggtgttagcaacttttcttaaagcagcagtgtgcagcaacagcaaaggtgctgctccttgtgggccagggctaccccataggcagtatgcccagcatagcagctctgagtgacagagtgagatcctgtctcaaaaacaaacagacaaacaaaaagtactacaaatatacagaaaccccgacagtgtgacattggcataagaagggacatatagatcaaagaaattgaactaagagtccaaaaagaagcccttaaaattatgttcaattgatttctacatgggtgtcaagacaattcaatggagaaagaataaaaatagtcttttcaataaatggtgttgggaccgctgtatacccacatgcaaaagaatgaagttgttataccctacagttctgtaatcatatttatactcagttttaattacatgcaaattaaagggcagattatgcagaaatttttaggaaaagggtggtaacttccaggtgattgccttgaaaaggggtagtaagttctgggtgttgccatagcactggtgggcatgtcttatagagaagtgcttttgcctcctccctgtttccattcgtctataatctagtcctgagtttgagccccagctcctgagtcaagtcccgcctcctgcctcaagaccattattgccatgtagagagtggtaagggagcatgaatggaatttggagctttactgcctggttcaagtcccagctccctcacttaccacataagctgtgtgattgaggagttactttacttccctgtgtctcggcttccttgtctgttaaatgtgggtgatgataatacctctgtagtacctcctagagaaaaaaaatatagcaccaagtgctatagtacacatagcaaatctgcaaaagtgctagctatcattattatctgaggcttttgacccagctctcagagaagctggaaatttgcatttttatgtgaaatttcctggcaactgatttaaaactttatttacatagagaatcaaacacaaggcatgtggcgccggtgtgcatatggctcttgaactgccagtttgacttccatgagccatagtaaattaaaggagcaagggggtgcctgccgctgacgttgtgtgatgccctgcagggtcccggaaagagaggcaggtgtacagcaaggcggtgaacaggctgttcggcgtggaagcctctggaaggagaatctggatccgcagggctgggggtcgctgtctctggcgtgacgacctcctggagcctgccaccaagcccagcatcgctggcaagttcaaggtgctagagcctcccatgctgggccacgacctgagactggccctgtgcttggccaacctcacctcccgggcccagcgggtgagggtcaacctgagcggtgccaccatcctctatacccgcaagccagtggcagagatcctgcatgaatcccacgccgtgaggctggggccgcaagaaggtaagtgtacgctggcttggtggaatcaggccaaaccacctcctttttcaggagggttgtggaggtcagagggatttcccaggactgcattcatccccaggaaggaaggggacattcctgagcattgtgctcagtgccttgcctcttgtcccgactttacagatgagaaaactgagactcggaggggcaaaacactaataacagtaatgcaagtccacatgcatctggtggcaatctgatgaagatgtgatttatagtttctatttttttaattagaatgaatatttacacaccaaataaatacatgctgggggtatttcagcatatatggaatatgccatgcattacttttctaaaatccaaaaaaatctggagcccatttggctccaggtgttctgtgggagagggctggactggtaacagatggttttctttgttttggttttcgggtttttttgagacagagtctcactctgtcacccaggctggagtgaagtggtgtgatcttagctcactgcaacctccacctcccgggttcaagggcttctcttgcctcaacctcctgagtagctgggactacaggcgtgcaccaccacacccagataatttttgtatttttagtagagagggggtttcatgatgttgcccaggctggactcgagtgatctgcccgccttggcctcccaaagtgctgggatgacaggcttaagccacggcaccaggccagagatgtttactaagtgcttaaatgtgccaagtcctgtcccaagaattctgcatgcgacggcacaatccctccagccaccttgtgtgtggtactagtgctagctccatctttgaaaggagaaaactcacaccaagaaaggtgaagtcacgagttcagagtcacacagtcagtgtgcatagttgcaggacccaaatccaggcagtctggcatgagagacacactcctgaccaagaccaggaaggggcaaagccagggttcaaagccaggaacgttgaccacagtgcacatttactcagctgatgcaattgcttgactgcaggttatggaatggtcaggtcagcccacaccagatatgctcaacacacctaatggtacatttgcctaaaatttatccttagtatttcatagcagaagagaatggtttcagtctttttaaaggtttttgtatttttttaactgaccttattccaactgtttctttaaaaatatattgaggccgggcgcggtggctcacgcctgtaatcctagcattttgggaggccaaggcgggtggatcacgaggtcaggagatcgaaaccatcctggctaacacagtgaaaccccatctctactaaaaatacaagaaaattagccgggcatggtggcacacgcctgtagtcccagctactcaggaggctgaggcaggagactcacttgaacccaggaagcggaggttaaaggattttttcgtgatccttgaacacatagcacttcgtggatgatttattaaatgtatcctctttgattattcttgcacttttttcctagtctgtctgtctgtctttttgccggtatctccctctccatctgtctctccttccctgtctgtctctctgtctctgtccctttggctttttcatctgtctctctatctctctcagtctatctctgtatctctatctctcctttgcctctctctcctttcacatactttctgaattctaaggattcaattaaacaaagaaattgttgctctgggccagtttctggtaagtgaagcttgtggattttcgcagggtgtgaaaatgtatgaaggaggtgtcacacttttttagctttttttgtcatttatttttcacaaagtctaaatcacaaaataacacttcatcataaaattttaattaacacacacttccctctggctttcagcaatttttttcatattaaaagtaatacatattcataaaaatttggaaagcaaaagagaaaaatcacctatgattctaccacccacctacaaactgttaatgtattttacttccaaatccttaatgcctgtttgctttttgaaaaacagttctggttaaatattgcaaatagtcattaatgccctgctcttttcatattgcattgtattttaaatatttttataagctcctcacaaacatcattttaatagatatttaaataaatagaatttaacagatctttaaataaatatatggtgacctatgttttcttttaggtagttatcagcttattgctattaaaaataacactaaacttttgtttatctacagagtgtcaggtaagcaagtgaacattttgatgcaaaaagaaatcactttttttcctctggattttggacttttgttagactgtatcacaaaagtgaaattcttgggccaggcgcagtggctcacgcctgtaatcccagcactttgggaggccgaggcaggtggatcacgaggtcaggagatggagaccatcctagctaacacagtgaaaccccatctctactaaaaatacaaaaaaattagccgggcgtggcggcatgcgcctgtagtcccagctactcaggaggctgaggcaggagaaaggcgtgaacccaggaggcagagcttgcagtgagccgagatcgcgccactgcactccagcctgggcaacagagagagactcttgtctaaaaaaacaaacaaaaaaaaaagtgaaattctttggccaaatgatagactattaaaacatataatttattaaattattaggtttttaagtagttttaggttttcagaaaactttgagtgggaagtacagagagttcccatacccctgtccaccaccacgcctctcctcctgttattaacatcttgctttagtgtggtacatttgttacaattaatgagccaatattggcacagtattattaactaaaattcatagttaatattagggttcactctgtgttgtgcattctatggcttttgacaaatgtataatgacatgtatctaacattccactgtcatacagaatagtttcacccctccaatatccccatgttccagctatgtgctccacctattcatccctccttcccttgcctgaacccccagtgaccactgatctttttactgtctccacacttttgcctgtttcatgatgtcatctagttgaaatcatacagtgtaattaagctttttcagattggcttctttcacttagcaatatgtatttaaggatcccttacggtttttgtgtcttgatgggtcatttcttcttattgcaaaatagtattccattatatggatgtacacagtttatccattcacctactgaaggacttcttggttgattccgagttttggcaattatgaataaagctgctgtaaacatccttatgcaggtttttgtgtgggcttgagtttttaattttttttttttattttttgagacagagtctcgctccgtcaccaggctagagtgcagtggtgcgattttggctcactgcaacctccgcctcccgggttcaagtgattctcctgcctcagcctctcgagtagctgggattacgggcacacacgactacacctagttaatttttgtatttttagtaaagacagggtttcaccatgttggccaggatggtcttgatctcctgacctcgtgatccacctgcctcggcctcccaaagtgctgggattacaggcatgagccgccgtgcccggctcgaattttaaattctttagataaataccaaggagcacacttgctgcaccttatggtaagagtatgttttggtaagaaactgacaaactgtcttccaaagtggctgtatcattttgaattcccaccaggaatatatgagcattcctgttgttccctattctatccagcagatggtattgtgtgttttggattactgacattgtaataggtgtgtaatagtatatcagagtttactattcactaatgacatatgacattgagcatcttttcatatacttatttgacatctctatctcttctttggtgaggtgtccaggtcttttgcccatattttaatcgggttgttcattttctcattgctggtttttaaaaggtctttgtgtattttggataacagtcttttatcggatgtcttttgcaaacattttctcccaggctgtgtcctctcttcccagtctcttcacagtgttttctgcagtgcagagtttttagttttaataaagtccaacttatcaattttttctttcatggatcatgcctttggtattgtatcaaaaaaaattaccggctggatgtggtggctcacggctgtaatcccagcactttgggaggctgaagcaggtggatcacttgagatcaggagtttgagaccagcctggtcaacatggtgaaacctcatctctactaaaaacacaaaaagtagctgggcgtggtggtgggtgcctgtaatcccagctactcgggaggctgaggcaggagaatcgcttgaacccgggaggcggaggttgcagtgagccaaaatcacaccagtgcactccagcctgggcgatagagcaagactccatctcaaaaaaatatatatatattaccaatctcaggtcatctagattttctcccatgttatctttaagagttctgtagttttgcattttacatttaggtcaatgattcagtttagtacattttgtaaagaatgtaaggcctgtgtctagattgtttttccccgtgtggatatccagttgcttcagcaccatttgttgactatcttttctccattgtatttcctttgctactttgtcaaagatcaactgactatgtttgtgcaggtctatttctgaactctcttctattccattgatctagaggcatacctcagacatattgcaggtttggttccagacaaccacaatagtaggaatattgcaataaagcaagtcacacaaatgttttggtttcccagtgcatataaaagttatatttacattatactgtagtctataaagcgtgcaatagcattatttcttttaaaaaatatatacaccttaattttaaaatactttacggctataaaatgctaacaatcggggccaggcacaggcggtgcatacctgtaatcccagcactttgggaggctgaggcagaaggatcacttgagctcaagagctcaagaccaacctgggcaacatggtgaaaccccatctctacaaaaaaaataaataaaggaagaaaacaaaaaaaattagccaggcatggtggtacacacctgttgtctcagctactcaaaagtgaggtgggaggatcacttgagcccgggagttcaaggctgcagtgagctgagatcctgccactgcactccagcctgggtaacaaagggagactctttctcaaaaaaaaaaaaaaaaagttaaccatctgaaccttcactgagtcataatctttttgctggtggaaggtcttgcctcaatgttgatggctgctaccttagttgataaagcagtggcagggtttgacaggattgactccaagtttgaaagaagttctactgtgagtaaaatgctatcaaacaccatcgcaacactactacctgaccagggtagtggttgccaaaggttggggtggttgtggcaatttcttaaaataagacaacaacgaaattcgccacattgaatgactttcttcctttcacgaaggatttctctgtagtatgcgatggtgttcgatagcattttactcacagtagaacctctttcaaacttggagtcaatcctctcaaaccctgccactgctttatcaactaagtttatgtaatattcaaaatcttttgttgccatttcaacaacgtttagagcatcttcaccaggagtagtttccatctttgaaaaacactttctttgctcacacataagaagcaactcttcatctgttcaagttttaccatcagatggagcaattcagtcacatctttaggctgcactctaattctcttgctgtttccaccacatcatcagtgacttcctgcattgaaatcttgaatgcctcaaagtcatccataagagttggaatcaacttctttccaactcctattaatgttgatatttttacctcctcccatgaatcatgaatatacttaatggtgtctagaatggtgaatcttttccagaaggttttcaattgactttgcccagatccattagaggaatcactatctatggcagctatggctttatgaaatgtatttcttaaataaaaagacttgaaagttaaaattactcattgattcatggtctgcagaatgaatgttaacaggcatgaaaataacattaatctcattgtacacctccatcagagttcttgagtgactaggtgcattgtcaatgagcagtaatactttgacaagaatcttcttttctgatcagtaggtctcaacagttggcctaaaatattcagtaaaccatgctataaacagatgtgctatcatcctggcttcgttgttcctttatggaccacaggcatagtagatttagcataattcttaagggccctaggatttagaaatttaaatgagcattggcttcaacttaaagtcaccagctgcattagctccttaatgcacagagtcagcctctcctttgaaactttgaagccaggcattgacttctgtcccgctatgaaagtcctagatggcatcttcttccaatataaagctattttttctacattgaaaatgtgttgttttatgtagccatcttcaccaatgatcttagctagagtctctgcataacttgctgttgcttctacatcagcacttgttgcttcagcttgcacttttatgttatagagatggcgtctttccttaaaccttatgaaccaacctgtgctagcttcaaacttgtcttctgtagcttcctaacatctctcaatccttatagaattgaagagaatcagggccttgctctggattaggctttggcttaatggaatgttatggctggtgtgatcttatatggagatcactaaaactttctccatattagcaataaggctattttgctttcttatcattcctatgtcacttttagtttccttcaagagtagcacttttaatttccttcaagaactttccctttgcattcaaaaccttgctgtttggcacaagaggcctagcttttggcccatcttggctttctatgtgccttcctcactaagcttaatcatttctagcttttgacttaaagtgagagacatgtaactctcattaacttgaacacctagaggccattgtaggtttattaattggcctaatttcaatattattgtgtatccgggaataggaaggcccaaggacagggagagagatagggaaatggccagtcggtggagcagtcagaactcacatgacattttttaattaagttcaacatcttacagggcatggtttgtggtgctaacaaacagttacaatagtagcctcaaagatcactgatcaagggctgggcacaggggctcatatatgtaatcccaatcccattcacttttggaggccaaagtgagagaactgcttgaacctaggagtttgagaccagcttgggcaacacagcaataccccatctctacaaaaaattaaaataaaaaatacctgctgggtgtggtggcatgctcccatagtcctagctacctggaggctgaggcaggaggattgcttgagcccaagagctggaagtttgcagtgagctatgatcacaccactgcacttacagcctgggtgacagagcaagaccttgtcttaaagaaaaaaaaaaaaagatcactgatcatagaagcaaacacatgctcttggaaaaatggctcttatagagttgcctgactcagggttgccacaaaacttcaatttgtaaaaaatgcaatatctgcaaagtacaataaaatgaagcacagtaaaataaggtatgcctgtctttgtccattctttcactaataccacactgtcttgatgactgtacctttatagtaaatcttaaaggtacctgaagtcaggtagtgccagtcctctaactttgttcctctccttcaataatgtacaattgtacaattgtactgactactctgggtcttttgcctcttgacataaacttttttatgtcatggttctttaaaaaaatcttaattgatatatattagtaatacatattttgtgggtacacatattttgatacatgtatagaatgtgtaacaatcgaatcagggtaattgggatatccatcaccttatacatttatctgtatcttttcttcgtgttcgaaactatacaatttattctagctatttagaaaggtaccataaatcattattaactataatttccctactgtgttatgaaatattagaacttattctttctaactatcttgtacccattatccaacttctcttcattcctgcctcccacccacacataaagtttggaatcagtttgtcaatatccacaaaataacttcttcagattgcattgaatctatagatcaagctaggaaaaattgacattttgacaatattgagcctttctatccatgaacatggaatatctctccatttatttagttttttgatttctttcatcagagttttacagttcttcttgtgtagatcttgtacatattttgttaaattaatgcctaagtgttccatttttggtggtgctaacataagtggtattatgtttttaattttaatttccaattgttcattgctggtatataggaaaatgattgacttctgtatattagtaatcttataccctgtaaccttgctattaccactcataagttccaggattttttgtttgttgttgttgacaattcttttggattttctacataaacaattatatcatttgtgaacaaagactgttttatttcttccttcccaatctgtatacattttatttccttgttttatcttattgcattagcaaagacttccaatatgatgttgaaaaggaatagtaagaggggacatccttgccttgttcctaatcatcatgggaaagcttccagtttgtcaccaataaggacaatgtttgctgtaggttttttgtagatgttctttatcaagttgagtaaattcctcctctattcctagtttgctgagagctttatcaggaatgggtgttggattttatcaaattctttttctgcatctattgatatgatcatgttattttttcctgttgatttgatggactatattaattgacctttaatattgacccagccttacatgcctagaataaatcccacttgatcatagcatgtaattttttatacattgttaattcaatttaccaatattttgtgggaatttttgcatctatgttcatattggtctgtagttttgtttttcttgcaatgtctttgtctggtttttggcattaaggtaatgctggcctcatagaatgaatcaggaagtatttctctgcttccattttctggaagagattgtagagaattgctataatttttttttcttaaattcttggtataattcaccagtgaacccatctgggattaatgtgttctggtttggaaggttattaagtactgattccattttttagtagatataggcctattcatgttgtctgtttcttcttatgtgaattttagcagatttttttctttcaagaactggtcccttttatctggattatcaaacctgtgggcataaagttgttcataatattcctttactctctgtttttttcctaactccccaaacttgttacctttactatccttttaatgtccatggaatctgtagagatgtcctctcttgcatttatcatattagtaacttgtgccttctctcttttttttctgagttagccttgctagaggcttattgactttactgatcttttcaaagaaccagcttttggttttggtgattttctctattgatctctgattttcaattttactgatttctgctctaatttttattatttcttttcttctgcttaagatgagtttaacgtgttctcctttttatagtttcctaaagcagaagtttagattattggatttagatccttcttcttttctatcatatgtattgaatattatagacttctctctaagcactgcttttgctgcaacctacaagtttgtgtgttgggggaggggtgtttgtttgtttgttttgttttgcttttcagacagagtctcgttctgtcacccaggctggagtgcagtggcacaatcatggctcactgtagcctcaacttcccaggctcaggtgattctccctcctcagcctcccaagtagctgagactacaggcacgtgcccacaaattttgataagttgtagtttcattttcatttacttcgaaatacttttaaatttctcttaagacttcttctttgtcccatgtgttcttctagaagtgtgttgtttaatccctaggtattttagatttttcagctgtctttctgtcattgatttccagtttgatttcattgtgttctgggggcatatattgcataatttctattattttaaacttgttaatgtgtcatttatgccacagaatgtgatcctttttggtgagtgctccgtgtaagattgagaagaatgcgtatcctgctgttgttggatgaaatattctgcagatgtcagttagcccagctgagtgacggtgctattgagaaccattgttctagggaaaggggtctcagcttttattagattgttagtggtgtctatgagtcagagaacttcaaaaagccctgatgcaaacattttaaagggctacttttctcctcctttctcccaggatctgagctgatgcccaaagctctgctcatgtgtatcatatggtggcatatgatggttcttcatgctggagactgagaatttacatctctaacaagttcccaggtgacgctgatgctgctggtcccaggaccacacttggagaaccgtggtctatcaccatgcaaggagtaaatgatataatgtatataaagtatttggcatcattcttactacctaatgagcattcaatttatgtttattatcagtgtttttgatattattatcaataataatatattatcaataacataataaatcaatcaataaaataaaaataataatacccgctcatggaattgttgtaaggattaaataagtcaatctgtgaaagcgcttccaagtgcagtacactttaatcccttagtaaaacttagcttttataattataattattattgttattttgagatagagtctctctctgtcgctcaggctggagtgcagtggcgcaatctcagctcactgcaacctccgcctgctaggttcaagtaattctcctgcctcagcctcccaagtagctgggattataggcacaacaccacgccctgctaattttgtaattttttttagtagagacagggtttcaacatgttggtcaggctggtcttgaactcctgacctcaggtgatccacccgccttcacctcccaaagtgctgggattacaggcgtgagccacggcacccggcctataattattatttattactgttattgtaataaaggttcttccaataatgacctactgaactaagggagcccataaaacaaaatcatactttaacacatgaatcaccctactggcattcaggagaatctacgatatgcaaagccctggggtagcagagcgcatgagccaagttgagccctttaaggaccttttccatgagttaaaaactcagatgccttcagagtcagaaagaaaacagaaataaaggaagcagtgggagtagaacaatagggaatgagagggcctgggagcaaaccagaaagagcacattgaacctaaaagaaagaatatatagtagtcagaaaaaaaaaaaaaacaaatatggtccaggcatggtggctcacacctgtaatcccagcactttaggaggccaaggcgagaggatcatgaggtcaaaagatcgagaccatcctggcgaacatggtgaaaccccatctctactaagaatacaaaaattagctgggcatggtggcatgtgcctgtagtcccagctactcaagaggctgaggcaggagaattgcttgaacccaggaggtggaggttgcagtgagccgagatcatgccactgcactccagcctcgcgacagagcgagactccgtctccaaaaaaaaaaaaagactgaggtttatggtgatccatgcttacaagaaaagaacacctaggaaggatgtttctgactggtgagagggagacagagatggccaggaccacaggagctcagagagcatgagagcactgggaggaggtgtcagtgaagacttccctcagttggtggggctgaccaggactgggccttcatggaggggggcatttggaaaagttgtagggaattggcctcacaggattggaagattgaggcatgcctttggtcttcctcttctctgctcctagcacatagtaggtgctcaataaacagagaaggatgggatgaatggatgatgggctgagagattttcatcttgaataagtagggaaagcttggaaacatctctgggggctcttggagaaattatctggtattgtggtagctccctgacctaaatttgactcccacctcatcttaatttcttggtttacttcctatatgagtttgaacaggaaaatacccactctgggccttaggtttcttcatctgagaaccgaggaaaataaagcctgtctcagaatggttgcaaggaccagagagaaaggagctattagttgtgcattcccttccttcttcccagtgccattgaagaaagacatcaagccccaactcccacttctgctttcccttccagagaagagaatcccaattacaatatcttactctaagtataaagaagacctgacagaggacaagaagatcctgttggctgccatgtgccttgtcaccaaaggagagaagcttctggtggagaaggacattactctagaggacttcatcaccatcaaggtgacctcagcctgcatctaccatgctgttcctagtggcacccactccccagagctgggggagggcgtcagaagctgggggggtttgtgcctttaactccagctttagctctccagggtgggaggagtgggttggacataaggggatgggtgcaatagtggcactcagcaatggggtatatggaggtgggggtggacatgactaatgatccatcctctaactcagccaggaccatcggtttcctggagggaggaggggtaggcgcgatggctcatgggtgttgtccccttcaggttctgggcccagccatggtgggagtggcagttacagtggaagtgacagtagtcaaccccctcatagagagagtgaaggactgtgcgctgatggtggagggcagcggccttctccaggaacagctcagcatcgagtaagtgccagcctggggggctggcagggaatggggctctcttccttgtggatgagccagagagaagttgccagggatgggggtgtgagagagattctggacaccccaggaaccagcccacagactatacatatcagccttcattcacttatttattccttcattcatccaatcattcatttactcaaatcatataactcattcactcagtcattcactcatatcattcattcatactttcatttatttatccatttattcactcactttcattcatttgctctctttcactcattcattcatgcattcttcaatttgcttactctttattcactcatttgttcattttttcattcacttattcctacatttatgcttcactcattcattcacacatgttcccatttgttcatggattcgtttatttacttattcattgtcaatcattcattcactccttcattcttccattcatccacttgcaactcatgtggtccttgattatactgacctgtactctggcccatgtgtaattgttaggaacactaagatggacagaaacagttttgcctggagaagggctctcagatacagatggcccttcacatgaggacagtgtgatttgtgaaaaagatcttgtccaaggtctgggggagcaaaagcagcccttaagtgagggtggggccaggaagaagtcccagtggagctggtgtttgagctgagccttaaatgatgaattgagattttcaggtatcaagaagtaaggacggtttgccaggcaaaggtcttggtgtcaacacctgatggctggtgttgtcagggaaggtctcctggaaaaagagaacttgatttgggccttgggtggattggaataagaaaggcatcctaggtggaacagagcagatgaaagcccagaggggggaagttcagggcacagacagaaaactagcctggctagatgggaagagtgtgggtggtagaagagaaaattaaattggaaatatgtttttttggttgttgtttttgtttgtttgtttttgagacagagtctcactctgttgccccagctggagtgcagtggtgcagtcttggctcactgcaacctctccctcccaggttcaagcgattctcctgtctcagcttcctgagtagctgggattacaggtgtgcaccactgcacccggctaatttttgtattttagtagagatgaggtttcaccacgttggccaggctggtctcgaactcctgacctcagatgatccacctgcctcagcctcccagtgtgctgggattacaggagtgagccaccgcacctggcctgcaaacatgttgataaggcttgaatgtcaagccacaaggtgaacttgatcctgaggagcctggggagccgtggattggcaggccagactcagaatggcaagaggactgacagtctgcctttctcccctccccttcctccagcgtgcctaccctggagcctcaggagagggcctcagtccagtttgacatcaccccctccaaaagtggcccaaggcagctgcaggtggaccttgtaagccctcacttcccggacatcaagggctttgtgatcgtccatgtggccactgccaagtgatggatcatgagggactgagaggggtggatttggcccctgtcctcctcctgcccattctttgtctcttccacatgggagccaggaggcctcagttaatcctgcctcaacctctgccctactttgtaaacttaggcaagttccttctcctcctgggcctcagtttactcttctgtaaaatgaagtgttgcactcagtaatccttaaacttttggacaaccatagatgatgtaagaaccgagggagcctctccaaccttcatctctcatccccatggctgggaggttgacagacccgagcatcagagaaaccctggcccactcagctctgccatcttccaccctgccacctcgctgtcaccctggctgacccttggactctccttgcttttcaaatgccctggccacatcaagagccaaggatcctccccacagtcctgacagagaatccaaaagtatcagagctggaacctaaccatccctcaacactcccattacagagaagaaggaaacttacagaggccacagggtgagctagaggcagagtggaggcccatgtgtgtgccatttatacctcctaagtcccgatcctaaaaagcattagattttaagcaaagggagattttccctcagtgaagacacaggcccaggatctgaggggcgattgctgcctaggataatcttaagaagataaaggaagggcccaaactggattgcattcctctaaaatctgcagccccaaatctgaagagggccagtgactaacagcacaaacaacagcaaacacctcacagggctcaacttacacaattctgaccgaacaattaaagttgagaaaatgtttcattcaatgggtgccaaaactgttgcccccagatcagctgcaaacaagagcagagctttccgtggaaattgtaaacaagggatcaagatcccgaagcatttcttcaaagaattgtaacaggatggaacatggctttaccaatacagtcctaaagacaaagcacaatcgaagcaatggctaccaagagggggaaatggttcagtcaaagcaacagtggaccagccggccaggcgcggtggctcacacctgtaatcccagcactttgggaggtcgaggtgggcggatcacttgaggtcaggagatcaagacctgcctggccaggtgaaccccatctctactaaaaatacaaacattagccaggtgttgtggtgtgtgcctgtaatcccagctactcggaagactaaggcaggagaatcacttgaacccaggaggtgaaggttgcagtgaaccgagattgcaccactgcactccagcctgggcaacggagcaagactctgtctcaaaaaaaaaaaaaaagtggaccggtcaggtgcaaagcttgtagaaactgttttttgggatgctcaagacattttgcttgtcggttttctggagaaccaaagagtaacaacacctgcttattacgagtgttttgataaagttagctgaagctttcagaaaaaaacccagaaaagcttcaccagagagtccttctccacgacaataatgttcctgctcattcctctcatcaaacaaaggcaattttgtgagagggttgactggaattcattaagcatccaccatactgtcctgatttggctccatctgacttctttttatttcctaatctctttttttttttttttttttgagacagagtcttgctctgccgcccaggctggagtgcagtggcgcgatctcagctcacctcaacctctgcctcccgggttcaagcgattctcccgcctcagcctcctgagtagctgggattacaagcgtgtgccaccacgcccggctaatttttgcatttttagtagagatgggatttcaccatgttggtcaggtgcgtctcaaactcctgacctcaagcgatcctcctgcctcagccttccaaagtgttgggattacaggcatgagccactgggcccagcctgtttcctaatcttaaaaacaaaatctttaaagggtgcccgtttttcttcagttaattgtgttaaaaaaaaaaaaaagactgtgttgacatggttaaatcccctggaccctcagttacttaggaatagactaaatggcaggtattattatttacaaaaatatcttgaacttgacagagctcatgttgagaaataaagtttctactttttatgtttatgttttaatgttacttttccatgaaccttttgaagtccccttgtaggtgtttagggaggggaatgtagctgaaggtggtgagggccacctgccacatagctctgtttccagtacaacgctcttgcccttggtgccttcgagtagcattttaatgggacaaaagtggcctccctggttattccagccccagtggaaagcagaagccgccccaacagccaatgagaaagccctgcttgtgagtgggagaggtagagaaattgacagaagacagcttagaagtccaagggagagtgtgagtgggaatgtggttttggaaattacaaagaaaaatgtgcaggtagggaattcctttcagctggtagggcaagaccctgaccatgtgcttaacacaggaagggcagaacaggtagttcaagactgagaaaagccttagaattggctggccatgggacactcagaaggacaccagcaacagggctttactgagtctcaggactcctgcttccattgagtccccctgtctcttaaacactatctgaaacttcatgaaggcccttgacaccaagttaggtcagggatctgagctttcacataccagaggggcctccaaacctttagaacagaggttggcaaacttttctgccaatgaccagatagtaaatatttcaggctttgcaggccatagagtctctgttacaactactcaactctgctgctatagcatgaaaactgccatacttagtgcataaacaaatgagcctggatgtgttgcaataaagttttacttacaaaaacaggtggcaggccaagtttggcccacaggttgtagttgactgaccttgccgtaggacaacacattgcttccaatcttgctccaggactgagctctgacaccaggctacaccttgccctagcatcgagcctaaacctgagccaaggccaagcccttaacaagcctcggactgaaactaggatgaggctccagcttgtgctcgtgaccccaaagacggccgtgactcagaggctaactaggtcatgaccctgatgccagatgggccccagaccttggcctcacactaagccctggatcctaccatagctaaatcctggcttgactctggctctagacagagcttgggctccacgtggagtcctggtccagtaccagacagtaccgaccccagactgagctctcatgccaacctcagatgactgagctccaatcctaagtgaaccctgaccccagactaagcccgaacctcaaacagagctctgatccaagactgagctctgagcctacactgagacctgattcaggctctggctgacccctgaactcactcaggtcccagatggatctggccttagctttggatttccattctcatctgagtttccccatatccctggtcactgggtgaagacagcctgtccttgagccagggatctgcgctcaccttcctttccctttgagacacttgggtagaaatatttgagaagcatggtgacccccctggattttttagctctgtcactctgtgagaatctgcattcatagcccaatccttatggagcgactgaccagggatccctcctctcatcatgcgggttcctttctcctattatgcatctgccacaagtgaaaggaacactgtaagcatcttccctggaacaggaggccatctgccactccacgtataaagatgctccttcccgcagggaggctccacgtgtcccagatccatttccccttgtgatggctccagacacatccttccagcaaatgccagctatctgtatgcctcgagctcggctgttgcaggctgagttcctagaaagctgattctgagatggagtttaggatgcaggatgttgatctaacagtgatctagggttcaacacccatggaagggagtgggggagcatgagtgtgcagaggaaggaatcgaaccatggtgcaggcccagagatagcctgtcctgaccccaggcagctctggagctagaatggcctatctgagttgtccagtttgggccaagatggctgggctttcctatgcctgcctttgttagcgattcacccaggaagggacatgaccttggctaagacagctctctacagcaggggccagccctggagcagctgacagctaagggtcatctgcctgcagcactcacagcagtttgaggaatgagccctccattgagggggttctgagccatgtgtctccatgtcccccacctacattctgtcaaaccccaagaacagagcagtgacatgataggttgcctaggctcgtgctcacagagattatcctctagctggtggagacaggtgttcatcacatttgaaaagatatgaaaaatacagtgagaaatacaagtaaacaagtagacaaattcgtgaataaataagctaattaaatttagtgaataagtgccaaaaagaagataaaagtgacagccacctctccctgagtggtggagttaagatagccctatagccttactttatttatttatgttttttatttatttattttagacagaatcttcctctattgcccaggctggagtgcagtggtgcaatcttacttcactgcaacctccacctcccgggttcaagcaattctcctgcctcagcctcccgaatagctaggggtacaggcacacaccaccacacctggctagtgtttgtttgtttgtttgtttgtttttctttttttcttttagtagagacagggtttcaccacattggccaggctggtctcaaactcctgacctcagatgatctgcctgcctcagcctcccaaagtgctgggattacaggcctgagccactgcacccagccaagatagccctactttggatggaggcaccagagaaagactctctgaggaagtgacgtttgagctgaaatgttaataattacaataaaaataatgattaaaatttaacttagttaacgtgcttcctacctgccaggaactgtttcaggtgccttacacctatttatttaattttcatagtaacgtaagaaagtaggtgctattattctttcctctttccaaatgaggaaactgaggcacagagaaatgaagccactttatacacaattgcaagcacataagatgcagacctgatatttgagctcaggccagcagagactgtcctctccgctgctatgctttactgcacatgcagagccagctgtgcaaagacggagagaactgtgtttcaggcagaggccacatgcatcagtttggggccttttcaataacacttatggggaatcacttttcccacaaagtcttgtggggagggtgacccgtggctcccatctcccactgcccctttctcttccttaggctgaggaagacagatctttctgcagcctgccctcagtacagcccacagtgggtgccttgactcagatggtgcatatgctccctcctggaacttggatcttaagagatcagaatggagagaagcttcagaaggcactaaaggtggtggtggtggtagtgccctaggcagtcttctaaccaggtgatttctgctgatacagttgctgtattccagttaccaattgctgggtaacaagcaaatgataacttaagccttaaaataatgatagttattggccaggcatggtggctcatgcctgtaatcccagcactttgagatgccaaggtgggcggatcacctgaggataggagttccagaccagcctgaccaacatggagaaatcccatctccactaaaaatacaaaattagccgggagtggtggcacatgcctgtaatcccagctactcgggaggctgaggcaggagaatcacttgaacccgggaggtggaggttgtggtgagccgagatcacaccattgcactccagcctgggcaacaagaatgaaactccgtctcaaaaaaataaataaataaaataaataataataataatgacagtttgttcttgaatctgcaatttgggtggggcttggtggggacaagtcatctctggtcaactcagcaacagctggggtggctcaaagactggaggctggaatcatctgaaagctcatttactcaccttgctggtggttgacgctggctgttggctgagccctaagctgtggctgtcagctagaacacctacccatgacccctccacatggcctgggcttcctcacaacatggtagctgggttgcaaggccaagcatatccagagagaaggagcaccagaggaaagccatctcgcctttatggccttgtgttggaagtcacctagtgttgtttctgccacattctattcatcaaggcagctcctcccagttccaatagactgcaactcatcataagaggtggaaagattctggaagagcttatgggactggaaatattgctgtagctatttttggaagtatacaatctgccatgctgtttcctgctgcctgcttcttgaccctctggaaattaatgggatccagtgttccctaggtctggtctgtctcttagtatcctctccaatgtgtgcttaatttctactccccatccccttttgcttaagccatcaagagtcacttccttttccttgtgacaaagaatgctgacccatacagcactgacgtagagatgagccagatgcgtctaaggaacagagtgaagccagtgtgcccgaagtgtcctgcagcttatcaccctcttcttgacctggtcagttgccctgacctttaatccctagacggtaaccaaagaaggagattcagaggccaataacttgactctgaccactccaatatcttctcattgaagtcatctttgtagtttcttcaggcctaaagggatgtccttcagaaagattcctggcctcctattccttggtcagccaaaggaggttatgactgtttcttatgttgaaagaagcaaaggagacgagtggtgtaagtgatggtgtttcttgtattggagttctccagagaaacaaaactaacagcatatgtatatggacagaagagattgattacaaggaaccggctcatggaattatgaaggctaacaagtcccaagatctgcagttggcaagctggagacccaggagagctggtggtgtagcctcactctgaatctgaaagcctaagaaccaggagagtcaatggtgtacttttagtcgaaaggccagcaggcttgagatccaggaagagccaacgtttcagttcaagtctaaaggcaggggaaagctgagtttgaaggcagtgaggcaggaggaattccctcttacacagaagaaagtcagcctattgtcccattcaggccttcagttgattggattaggcccacccacatcagggagggcaatctgctttactcaaagtctaccaatttaaatgttaatctcatccaagaaaccctcatagaagtgtccagaataatgtttgatgaaatgcctgggcaccccatggaccggtcaaattgacacattataactgaccatcacagtgctgaatgaagatggccattgaatagaccttagaaagcagtggcagtctaagttggctattgctatttgtaaaattggtttgcatcaaacataggcatgggaggcagggagttaatattgtctaataacaacaatatttagtgagagcttatcatgtgccaattagatagatagtattgttatttctattttacagagaaggaagctgagtccctgagatgttgagtagcttctcatagattaataagctggtaatggcaaagcagacagtgaattcaggcagtctagctccagagcccatgtgcacaaccacataaaggacatttcttttctttgcctgggacatttccccaatgtctttctggaatgagagaagggcagttcggtgaacatgccatacagtgtatgtttatgcatgtatgtgcatgtgtgttgctggtattatagcaactgtttgacacttgcacactatgtaacactgactttatttcttccctctttcaaaggcatttgcatttttagagaagtatctggagaaggcaatacttaatacagattacaggattaagtattactgtcttgggggaatttaaagtattagcaggggaacttatttggattacaggactccccaataatctctcaaattttaggatgcctccagaactggatgaggttccagaatcctgtctcactagaccaggtcaagtgacacagcccagcctagaaatttgcccctctttactcccccttctctccagaactgtcatcaaccaagatgccaacagggaatgggttgagctcctcagctgtgtgaacccagggaggttatgcttaggggagactgaggcctttttaatctccagacaagggctaaaccccatttccataacctcagagctgacttggatagatgagagggtggtatggtggtgcacttgcatttacatttcttcttctttgttttttgctttttttttatttttatttttttttttgagacagggtctcactctgttgcccaggtagggagtgcagtcacgtgatctcagcttactgcaacttccaccgcctgggttcaagtgattctcccatctcagccttctgagtaactgggactataggcatgcgctaccacgcccagctaatttttttattttttggtagagatgggttttcaccatgttggccaggctggtctcaaactcatgacctcaagtgatccgcccccctcagcctctcaaagtgctgggattacaggcgtgagccactgcgcccggccagcacttaacatttcttgagtacccagaggcaggaagtgggagtggtgattgggaatgaggaaaagatgttcgttattattacttccatttggcaatgtactggagcttccagtgaaataaagtaagaaacagaaattaaaagggtaaggattgaaaaagaacaactaaaattgtctttattcaccgtcgatatgattatgtacaattatagaaaaatccaaaagtatctaaggatagttagtaggattaataagtgaatttagtaaaattactggatataaggttaatataaaagagtaatcatatttctatataccagcaacaaaaagttttttaaataaatttaaaagataccattacaacagcatcaaaagtcatgaaatacttggaaaaaagaatataacaaaagatgtgtaaggcctctacccagaaaacgataaaatattaatgagaaaaatgaaagatctatatagttgaagaaatatatcaggttcatgaattggaagactacaaattgatctatgggtgcagtgaaattgcaataaaaattactatccatccatctatcctaaaatgtatatggaaatgcaaaaacccaaaagtagccaagagtattttaaagaagaacaaaatgagaagacttcccctactagatatcaaggttcattataaagctatattgattaatatgatgaggtgtgccaggaggaagataaggccaatggaacaaaatggaggccagaaatagacccatggatggatatttgatttataataaatatataattaagattttttaaatgaatgatgttgggtcagttgaatatccacagaaaaaattaaaatccggctgggcacagtggctcacgcctgtaatcccagcactttgggaggccaaggtggacaaatcacctggggcaaggagttcgagaccagcctggccaacgtggtgaaaccccgtctctacaaaaatacaaaaattagcaggcatgatggcaggtgctcgtaatcccagctggggaggctgaggcaggagaatcgcttgaaccctagaggcagaggttacagtgagcagagattgcgccactacactccagcctaggtgacagagcaagactccgtctcaaaaaaaaaagaaagaaaaaaattaaaatccaaaccgtacctgtgaagaaaaacgtgactccatcttggatgctaatacaccatgttgacttctgattaaccccagtcccatgaatgcctcctgattcctattttatttactgtccttagtgtgagaacatgtactcactataaatcctggctttaaatcaaagcaactttgatattgtcatacaaattataggctatgacacacacagcattctttcctgttccacagggttgcctttcattgtctttatggatcacatacactctttccctatggtatataagctctgatttgcctttcattgtctttacggaacacatacactctttccctatggtatataagctctgatttgcctttcattgtctttacggaacacatacactctttccctatggtatataagctctgatttgcctttcattgtctttacggaacacatacactctttccctatggtatataagctctgatttgcctttcatcgtctttacggaacacatacactctttccctatggtatataagctctgatttgcctttcattgtctttacggaacacatacactctttccctatggtatataagctctgatttgcctttcattgtctttacggatcacatacactctttccctatggtatataagctctgatttgcctttcattgtctttacggaacacatacactctttccctatggtatataagctctgatttgcctttcattgtctttacggatcacatacactctttccctatggtatataagctctgatttgcctttcattgtctttacagatcacatacactctttctctatggtatataagctctgatttgcctttcattgtctttacggaacacatacactctttccctatggtatataagctctgatttgcctttcattgtctttacggatcacatacactctttccctatggtatataagctctgatttgcctttcattgtctttacggaacacatacactctttccctatggtatataagctctgatttgcctttcattgtctttacggaacacatacactctttccctatggtatataagctctgatttgcctttcattgtctttacggaacacatacactctttccctatggtatataagctctgattttagggagtaacagttgggaaatctacctgtctcgctgccacctaagactaggcttctgtacatgagttctctaataaaccatcccttactcaccaacgagatttgtctgcctcattctttggtttattggcttcttttgcattcgtgggtcactttgcatatccagccctttcacagaacaatcgggggtcactttacctatacggtcctttcatggaacactaccccacagcattcacaaaaataaattccaggtggatggcaaatctaactgtgaagggtaagacaataaagataacataaaaaaaaaaaaaactactaccttagaataggaaagatttattaaatgatgcacacaaaaaagcattaaccataaaggaaaacattaataaattgaactacattaaaatttaagacattgtgttaatcaaaaaacaccactaagaaagtaaaaaggcaaactataaaaagaaagaaaatatatgtgacacataaaatggatggaagtttatatccaatagacgtctataaagaacacacagctcaattaaaaatgggttagacacttaaaaatgcactgtgaacaaaatttcttagaaaaggaatttggaggaaagatacttattccagtgaaaagtttgcaaactgggaagacacaccctgcatgtaaaatgaagatgctttccagagaacaaagggaaagcccaggttttatagcaaaacttcccaccccagttcccaattaggtccatttatgcaaatgaaggattcaaacttgctttgttctgattagtcaatacagttgagccctgattggtcaaggcagatgacctctgattggttggttcaggtgagagctgtaagtcccaaagttaaaaaagtgtgagcattctgggaatgcagagtacacgtataacctctagtcagcaaatggctgcttggctgtattttatattttattttatttattttattttattttattttattttattttattttatttattttgagatggaatctcactccgttgcccaggctggagtgcagtggtgcagtctcagctcactgcaacctctgccgcctgggttgaagcgattctgccgcctgggttcaagcaattctcctgcctcagcctccccagtagctgggattacaggtgcctgccactgcgcccagaaaatagcgggaaagggggacatcaaaatgtccacattcccaggatgtcatcaggaatggcagagtactaacctccaaattccactcctccattaaagcaataagaaccttgacaaaaattgtcaaaaacaacatgttcagaactctgtaaattaaccaaaggcttccaacaatctgaggattgcttaatcaatttaaaaaaaatgaatattagttagaatggtaagaactttgtagtgggttttttcttgtttgtttgtttgttttctgggagggagtcttactctgtcacccaggctggagtgcagtggcccaatctcagctcactgcaacctccacctcctgggctcaagagatcctcccaccagccttttgggaagctggtactacaggcacatgccatcacgcccagctaacttttgtactttttgtagagacagggtaccaccatgttgcccagggtggtctcaaactcctgggctcaagagatccacctgcctcagcctcccaatgtgctgggattacaggtatgggcctccctgctcggcctctttgtagtgttttaacttcccatctccttggttgtcttgaaaaccaacatccctgcaattatagtgaaaatcagtagcttggcagacactggaaagggaagaacaggttttgagctcctccaaaacatcattctcagtgaatgattattatttgacctctctggtggttccctaaaatcttcacttgtagggtttctttttatttgagctgactcagagcttgctcagtacaaatagactctttcccctaggagtatgttgaaaacaagcagtggaaattgtttaacatcaaaactacctaaagttggggcatcaaagctacctaaaatagggtaaacaaaaagctgaccaaaaatattaaaagatgagaaatgagatgtccacaggggactttaaaaagctccaacatacatctggaaatctaggaggccatttgtatgcataggactgtacacctgcccagggcttcctaagttattcctatacacctgcctaggaataacttaagatgacctaaattttcacctctggctgaccacaggtgctacacaagaaggaagtagaggataaggaatagctgtaaacttcctgcctgagaattgaaggtatgtcctaacatacacaaggagctcctcatcaaaggctggggagcttattggttcaagacatttaagggaatctgtgctcaataattagctgactactaagctaattgagcagagagtccagtggcaatacacaactttaaagaattaatacaagaaagtcactgaatgaacaacaaaaataacaacaggcccttggagagcagtgaactctggcttccagagttgccacattattttcaatgtccagttttcaaaaaatatacgagacatacagtgaactaagaaaatatagcctatacccaagaaaattttaaaaactcaatgataactgttcctgaggaagcccagatataggatttactagacagtttaaatagctgttttaaatatgttcaaagaactaaaaaaaaagctatgtgtaaaaaaatgtttttaagtataaggaaatggctcaccaaataaagcatatcaataatggatagaaaccataccaaagaactaaacagaacttctggagttgaaaactataataaataaaataaaaattttaatagaggggctcaagaacagatacgagctgacagaagaaagaataagcaaacttgaaaacagattaatttgaggttagagaccagcagaacttgttttctagtcacaaccctgctgaacaaaatagtatctgattcagataggatgaagtaaagaaactggctgaaaccagcagatggtgacaaaagtaatccttagttgccctcgttgctcattagcataaatcacttccaccagtgccatgacagtttacaaatgccatggcaacgacgcagaagttactgcccctttccatggcaacaatgcagaagttaccactcctttcctacaaagttctaagtagcccacaccctcaatttgcatcaacctgccccttaatttgcatgtaattgtaagtgggtaaaatacagttgccaacaccttgccgactctgggtgcactgcctatgagttagccctgctccacaaggagcagcactattcaataaaagattgccatctggcagggcgcagtggctcatgcctgtaatcccagcactttgggaggccgaggcgggcagatcacctgaggttgggagttccagaccagcctgaccaacatgaagaaaccccgtctcgactaaaaatacgaaattagctgggcgtggtggcgcatgcctgtaatccaagctactcaagaggctgaggcaggagaatcacttgaacccaggaggtggaggttgcagtgagccgagatcgcgccattgcactccagcctgggaaacaagagaaaacactgtctcaaaaaaaaagagtctagaaaaagaagagcaaattaaactcaaaggaagcataagaaaggaaataatcatgaaaatcaacaaaataagaaacagaaaaacaggctgagtgaggtggctcatgcctataatcccagcactttgggaggccgaggcaagcagataacttgaggtcaagggttcgagaccagcctggccaacatggtgaaactatgtttccacaaaaaacgcagaaattagccgggcattgtggtgggcgcctgtaatgccagctacttgggaggctgaggaaggagaattacttgaactcaagaggcggaggttgcagcaagcagagatcgcaccactgcactgcagcctcggtggcagagtaagtgagactctgtctcaaaaaaaaaaaaaaagaaagaaagaaagaaagaaacagaaaaacaatagagaaaattaatgaaatgaaacaaagagttattttttgaaaagatcaataaagttgataaacttctagcaagactgatcccccaaaattgagagaacacataagttaccaatatcaggaatgaaacaggatatcgccatagaccctgaagacatcaaaataataaaaagagaaaattctacaacttaaaagaaatggaccaatttcttgaaaaatatgctattgcaagtcactcaatatgaaatagatcattaaaatagccctattattattaaggttttaatttgtaattttctaactctcaaaaaaaccctccaggaccagattatttcattagagaattctaccaaatattaaagaaaaattaacaccaattctacacaatcccctccagaaaagagaggggggtggcattcccaccccattttatgaagttaatattacccttataccaaagccagtcaaagacagcacaaaaaagaaaactataaaccaataaccctcactgatatagatgcaaaagtccttaacaaaatgaaggaatagaagctgagggtaaagtaatgaataaagattccaatattctgttaacacatcaaaagaggctcagagcaagaggtgacagtaaaaaacaatctaattaagaaaatggccaggcccattggctcacacttgtaatcctagcactttgggaggctgaggcaggcgaatcgcttgaggtcaggagttcaagaccagcctggctaacatggtgaaaccctgtctctactaaaaatacaaaaattcactggaaatctcttgaacccggaggcagaggttgcagtgagccgagatcgcaccactgcacttcagcctgggcaacagagcgagactccatctcagaaaaaaaagaaaagaaaagaaaaagaaaaagaaaatggccaaaagacataaacttttcactgaatagaatgtgcagatggcaaataagccatctgccatgaaaagatgttcaatattattagtcattaggaaaatgcaaattaaaaccacaatgaaatgtctctatataagaacagaatggcaaaaaaaaaaaaaaaattgtgacaacaccttccttcctggcaagaatgcaaagaaacttggttattcatctattgctgatgtaaatgtaaaatgttatagccactctgaaaacgagtttggcattttcttaaaacaactaaacctgcaactaacatataacccagcaattgcactcctgttcattcatcccagggaaatgaaatttgtgttcccacaaaaacctgtacatgaatgtttgtagcagccttattcacaatagcaataaatgaaacaacttggatgtcattcaacctgtgagtagttaacctgtggtacatccataccacagaatactactcagtgataaaaaggaataaattattggcacttgcaacatctggaggaacttccatagaagtatgctgagtgaaaaaagtcaatcctaaaaggttacatactgtatgattccatttatatgacattcttgaaacaacaaaattatagatctaaagaagagattagtggttgcctgaggttaaggagggtgtgggagtgagaatgagtgggcggggttataaaaagacaacacaatcacacaaagaactttgttatgttgcaaatgttctctatcttgactgtatcaatgtcaatatcctggatgtgatatatcctggttgtgttgatttgctatagttttgcaagatgttaccattgggacaaattgggtaatatataagtatgtctgtctattgtttcttgcaaagccatgtgaattgatagttacctcaaaataaaaagtttaattaaaaaaaattacaggccaggtgcagtggctcacacctataatcccaacattttgggagtccaaggcaggaggatcacttgagctcaggagttcaagactagcctggccaacatagcaagaccccatctctacgaaaaaaatgttcaacttgaggcagctgatggaaaaatataaatataacaaaattaattgagatttgttgtattgcctagcacatgtgtattcttgagaatgttcaatgggtgctcgagaagagtgtattctactgttgctgggagttgggggatgtccatagatttgttaagccaacatatttataatagctgctgtgaaccctgtgtctgctaagtctaacatctgggtgccctcagagattttgtgtattgactgcttttttctatatatgagtcatactttcctggtgtgcgtgtgcatgtgtgtgtgtgtgtgtgtgtgtgagagagagagagagagagagaagagagggggtttcatgcctcttaattttttgtggaagactggacatgttacgtaatatattgttgcaactctgaattctgatttccccaggaggggtggttgttactgctgttatttggctttttgcttcctggatttggctggattaattctgtggaacctatttccctagccctgggtgagggctgatgtctctgtgggttgttttttttgtttgtttgtttttaattcttgtttttattattgtctgacttcctagaagtcacccccgaatcagcatatgattagtcagaggttgtgcttgtgattaagcacaaggggacttgagcacataagccttccatcctttggtagattttcttaaattaatggtcctcgatttgttgtgtgtaatttaataaatccaaaatggaattccttgtcccctttcacgggggaattcttgccccctttcactgtcaaagaaaactctatcattttagctttttaggtccaaacccttgaattattctttatccctgtttttctccctcacctcattaaatccaacttcaaatcctgccagtttgaccttcaagaggtacccagaattcatctgtctctcaacaccaccaacaaccacagcctgatccaagcccccatcatctgttgcttgcaatatgaccgtagcctcctcactggtctcaccgcttctgctcctacctcactttctgtcccttctcctccttttaagcagccacggggagcttctgaaaaaatctaagtcacatcatatcattcctttgctcaaatcccctccatggatgacccctctcactcagtgaaaacaaatgtcctccaggaaccctggatcctctctgacttcatctcctaccctttattctcttgctcctttaacgccagagtgactgtatcaatcagggtctactaagatagaaaccatacagtaatttgtgggagggaaatttaatatagagaattatttaccgtaacagggagttggaggaattggaaggtgttgaggtgaaaataaaaatacagagatgaatctctacacttaaaacattttatttggaaagcaagaattgcaactcaggacacacacatagaccaggatgtcttcagtatgtccaaagaacaaagagaaggttgggagtttaactggaaaaagtaacgttatgtaccgttttgaaagaaagttcattggcattagagatttgggagctggcaagctctgactggtgagtggcagctgtgggtaaaaccagtcttagaggcgtggcacgttatttcagcagcttctaggtaacactggtcttagggttacaataggacatttagcagctgggtgtgtggaaaatttaattcttggagtaggtgctatgttcccagagtgattttttcccctggcccctcaactctgatttagttggctatgacgagaatggcctcaatttgtatagtcaattttcacaggggtgagctagtaagaaataaagagaatgccaaaggatgctggaattgcagaattaagggacatctactatccctagagtgcccaaggaagagcacactcccgtcaccccaacaaggttgagggccaggcttcgttggacagcgcatgctgtggttcagtgttcagagaagtcactgtggtgcctcactggtggaacttgctggaaatacgcccaatgggataccagggaaagccattcatggtgagccatctccctagaggcactctgttacaaaatcatcccaggaggtgccaaaagcagctgctggttgctgggtgctgatggccaccatgcattgtaaaagccatcttccttacagaagcctggtgctggagaaatcactgaggctgtgagccaggccctagggaaacagggcaggctgcagaactgctaagacctggaactccagactccagaacctggaaagcaagcccgtcttcctccactgtctctccagcaccctctaccggccaaccttaacattgtgccagctgacaaaaactattaagagtctattctacagagcaggccctgaagggtggatttggagctgagatgcaataaattggtaactggcattgtgaccttcttgatattctttgaaaaataaagctaatacccacctcaatgcctttgccattgctctaccctctacctggaattctttttctcaattcccaaccatatctgcgtggctttttcccttatttcctacaggtttctgcccaagttgctcttgatcactagagcctttcctgaccaccctaatgaaatagatccgtgttgacaggactctccctgtttacttttctccatagcaattattaccatttgacatcgtttatttacatgtttattctttactgtccatctcccctttctagaatgtaaactatcaaggacagggaattcttctattttgttccctcttgtacccaggagagttgaacagaacagtacctagcacatagtacgcattttaatatgccttggattaatgagtgaattatagtaaactggaagcatacaggaggagaagggaaaaccccaaccatagtctcatcacctagacactaccacagctaacaagacggcaacttttcctgtacgtttttctccattgaggaattttgctttttttttttttttttaagactagtcaagatcagtagtgagaaggggggaaaagtagaccaaagaattcaatctttgactgtgaacaatcaacggagatatatcactaccttcagactagtctatttttgctttcttttgttttttaatttttataggggcttaacatatatattaaaatgtatttatatcaaaaatgtgcagctcactgaattttttccacaaactgaacccacccagggaaccagccctcagatcaagaaacagaacattatcagcaccctggaagctcccctttgtgtcccttccagggtaaccattatcctgaactgtagaagcaaagatgagtttttgtactttatatgagtggagtgacacagtacgcgcgcttttgtgtttggcctttggcttctgtccttgacattttgtatagtatattcattcataccgctgtgtgttattgtggatcttttgtgctctttgatgtgtaatattccatttttggaaacactataatttgtccattatacaatgctgtttgggcagttcccagtttggagctattatgaatagagttgctacacatattcttgtacctgttttttcgtgaacacatgtcagtatttctgttgggtatgtatgtaggaatggaattgctgaatcacaggatatgcatatgttcagctttaccaaccaatccttcccccaaggatataatctttccttcctgtcaactagtatttgctgacataacctacatgaagcattgtgtgtgggcttcaatacaaggcatcactccctcaaaccattttggacctgctagggagcctgccctgctctccccagaaagcctcatgatgtcagtcttttcatgcctcttggtgcatgtgtagaatcctccgtggcagatgaccaaccacagttggatggagagggagggtcaatgccaccctccagtgaggcaactacaagacacacccccattctatagctgaggaaactggagctcagaaaagttatttatcattcattcattcattcattcattcattcaacaatatgtattgtgcgcacagagcagtgggaacaacatagacaaattccctgccctcgttagagtgggggaagtagttcacagaaaaatactgctttttaactccataaaaacataattagcctcctttataactaaacatatacaattaaaacaaggagatattttttatcagattgaacaagatctagcaaaataacaatacactgtattggcaagtatgttggggacaggcatcggtgtacactcttattaatagcatagaataatacaactagagggctatctgttcggcatatctaccaatacttattgtattttatttatttatttagagatggactctcccgctgctctgtcacccaggctggagtgcagtggcacaatctcagttcactgcaacctccgcctcctgggttcaagtgattctcctgcctcagcctcccgagtagttgagattacaggcgtgtgccaccatgcccggctaatttttgtgtttttagtagagatggggttttgccattctggccaggctggtctcgacctcaagtcgtccgcccgcctcagcctccccaagtgctgggattacaggagtgagccactgcgcccgaccccctgccaaatacttcagatgtcacccaggccccctcgctcctcagaattctacttttacgaatttaaatacagaggtatggctacacggctaaagagggacggggcctgacacttccttctctctttaaataaaatgtattttatttctatataggtcttagtagaaaatggggacaatacagaaaatgagaaaaaaatgtaagtcacgatcccagcacccatgctaaggctgagcccacgcctttgcggctcccttcctccctgtaaagcaatgctgcccccgtgtggatttgatggggttttttttaaaaacacacattatttcacactttttttaaatgcaattaattttaactaggtaaggcgcttaatggttcaatatttatttatttatttattttgagatggaatttcgtggtctcggctcactgcaacctccgcctcccgggttcaagctattctcctgcctcagcctcccaagtagctgggattacacgcatgcgccaccacgaccggctaattttgtatttttagtagagacggggtttctccatgttggttaggctggtctcgaactcccgacctcaggtgatccgcccgcctcggcctcccaaagtgctgggattacaggcgtgagccacctgcgccaggcttaatatttaaaaggttctaaatggtattcagtgaaaattctcccttccttttctactcctctcaaaccaggttcctttccccacaggcaaccaaactggccaattcgttatatacagacttccagagataggtcatgcacacgcctcgttcaataaatgacagtttccttctttccagcccctgcctttgaatcatgattgttgctcctaaaaacttagaaacgccaaataaaaaatacttttacgcaaattatccagcattgcctgatttacagttacgaaaaatcaaaaacaatatgaattcccaaaataagagcaatgcccaagttagattacacccactagtaatcattaagacttgtgtaacaacatgaaaaatgtctatcagaggtttgtttttttttttaaagacaatatacaaaagaggacataggtaatttaaaagtgaaaacaagcctgggcaataaagtgagaccctgtgtctaccaaaaaaaaaagaaaagaaaagaaaagagaaaggaaagaaaaggaaagggaagggaagggaagagagaaaagaagaggaggggaggaagggaaggggagaggagagacagaggaaagaaaaggaaaggggaaaggaaggaaggatggaaggaaggagtcggggagggagttaggaaggattagctgggcattggtggagtgtgcctgtagtcccagctactctggaggctgaggcaggagaatggcttaagcccaagagttcaaggctgcaatgagctaagattgcaccactgcactccagcctgggtgacagagtgacactctgtctcttaaaaaaaaagtcaaaactattccttaaaaagaatgtaacaatataacaatgatgtacatttttcagctgtcaaactagaaaagtgtgtttctcaatgagaatcattaattctgaggagcatggtgtgaaaggtgtagttgtgaccgatttgtaacagggcaaactgactcaagcttttattatagactttgactcagaaattccatttttaagtatttaaaaatagaacaatctttgcaaaaatatggtcatcacattatttgttggtgaaaaaaactaagctaaatgttcaactacagaggattggttaagtaaattggttaagtgtttcatttaatgagatactaaaatcataatgtttgcaaagattggggataggtttttgatgttttgatgttaagagaaatagagagttgaccatatagtaagatgatgaaacccaacaagtagagaaaaagctagcattgaatatttggggggctgggacacagtattttatttctacaatcattctttaatgagcatgtttaagtatgttttttaaaaaaacagaatacatgaactatggaatagcatgcctgtgggcctgaccaagcagaatgcaatttttttttttaagacagtcttgctctgtcgcccaggctggagtgcactgacatgatctctgctcactgcaacacccccgccccaggttcaagcgattctcgtgcctcagccttctgagtagctgggattacaggtgcgtaccatcatgcccggctaatatttgtatttttagtagagacagggtttcaccatgttggccaggctggtctcaaactcctggcctcaagtgatccacccacctcagcctcccaaagtgctgagattacaggcgtggccacccaccgttcctcgccagaatacaaatttaagttcaacagcaaacctagtgcctttaatctcttacttagtcctcgcagccacagaccaatttactgacgtgaactaaggttatagacacttactatgaaaactggaatagagctcatataggtgagagcacattcaaattctccatccagacttctttcaccaccagagacttgggagttaccttaacgatacaatggtcagaatacccagatgtctgattacagacttttccttttgttctttctctttgtcagtgattctcaaaagccagcgtgcctaagatttttctatgaagggttgtatacacaaaaccatatatgctgtacttcaagagagtttgagtagattttcaagagtagttttgaggatacagaatttttactgtgctaaccattagccaacgtgtgactgcttttttttcctttgcgtgattatccttattatttgcataataaaaataagagtactggccaggcatggtggctcacacctgcaatcccagcattttgagaggccaaggcaggcggaccacctgaggtcaggagtttgaggccagcctagccaacgtggcgaaaccctgtctctactaaaaatacaaaaattagccgggcgttgcggtgcatgcctgtagtcccagctattcgggaggctgaggcaggaagccgaggttgcagtgagccgagatcacaccactgcactccagcctgggtgacagagcaagactctgtctcaaaacaagggggaaaaaaaaaaaaaagactactgccttttagctcaggctgggagtataaaacccttttggatcacacctgtcagggaagtgggaagctagctgcctttgcagtttgtgctactcagggttcctgtgacactgagccaaccattggctctaccaaaagctgatgccaaactcacctccctgatgtccttattctaataaacctggaccaacttcatctttactcagccttttcctccactgggaatatcctttccacaacaaaaagccttagtaaactttttctgtgaagaaacttttttttttgagatgaaattcacatagcaacaattaaccattttaacaatcacaactcagtaacttgagtgtattcacaaggctgtaaaaccaccagctctcgccctataaaagtatcctattcccattaggtaggcactccatttcctgctgctcccacccctggaaacctctaatctgctgtctctacagatttatctattacgggtagcaaatatccatataaaagcaattatataatagatgatcttttgtgtctggcttttttcacactacacaatgttttctaggtttatctacatggtaacatgtatcaatatttctttcttttcagctctattatattccattgtatgtattgtgaaagttgtcagaaccaaaatggagtcacttgtatgtcttttaaaaaaccctgccaaagccgaaaggctatgaagggaggattctgatgcataaatgataaaaaaaaaaaaaaaaaaaaaaactactacaaaagactgtaaaaacacaaccttgcacaaaggccactgcaaccttatatacatacaaaaatatttctgcaaggacttctgcttgttcaacctcagactggtgccaccaggacttgttattaatccctggagttagggatagttatcccaagacaattacataatccttgtttttccttttaatctgtcttcctttacctccctgaatacgcatagtatggcacatggactcccactgcaatgccccattcatgaataggtatcattttcttttacggcctccgtttatttaggttgacagtatataccacaatttgtttatccattatatgttgaatattttgggttgtttccacctttgggctgttatgaataattctgctaaaaccagttgtatacaagtttctgtgtatcaaactacctttgcaaaagtgacagtaagagaaatctgacatggctgactccatcttgcttctgaactcaacaggcctacgtcttggtagaattcaggcccctctcatcctcttcacttgagggtctttcactagttttataagggcagtttagcttttgggaagagctcatcaaatcttattgttgacgagtttttatagagctttatctccagccacctctgctccaggaggctggtgggtgggagtgaaagttccaaccctctcatcacttggtctttctggtggctggccccatcctgaggctagctaggggtcccactctaagtcatgaactcacgtattatcccattacacaggaaattccaagtgtttttcagttgctgtgataagaaccaggaaaaaaggctaaatatatttcatattaccacagatacatatatctaggagtggaattgccatatagtaattctgttcagctttcaggaactgccactgttttccataggggctacaccattttacgttctcaccagcaatgcatgagggttcctgtttctccacaccctcaccaagagttatttttttcataaataagccatcctcgtgggtatgaaccggcatctcattgtagttttgatttgcatttctttaataaccaatgatgttgaaccagttttcatgtgctttttggccatttgtgtatcttctttggagaaatatctgttcaattcctctcatttttgaaaaaggttatcttttttattaagaattttttatagttcaaatagcaaactacagatatcagactatcatatcgtttgcaaaaatattctccccttccataagtttttttttcattcttcaccattcttggatgtacaagtttttaattttgatgaagtcccatttacatattttttcttctgttgcttgttttcaatgtccaatgcaataatccattgccaaatccaaggtgatgaggacttactcattttcttctagatctagctcttacagattgtttaccaattttgagttaatgagtgataaatgaaggcatatgaggtagagttccaacttcattcttttacatgtggttatccagttgtcccagcaccatctgaaaagactactcttttcccaatagatggttttggtaccactgcagaaaatcaattgaccatttatgtaagggtttatttctgtactctcatctatccattgtctatctttatgccagatgcagtgtttattacaattttgtaggttttgtgagacttctaatgtgatcaagattgttttggctatttggggccttttgtagcttcatatatatgaggattagcttctccatttctgcaatgaccactggaattattatagggattacattgaatgtttggagactattatttgttactttaatagtaagtctggatccatgaacatgttggctttcctcatctacttagttttctttcaggatttgtagttttcaccttggtttgattgattcctgggtattctggtattgcttgctttgattcttaggtattcttttggttgctatcctaactggaattctcttccatttccttttcagattgtttgttggtggtgtatggaatagtttttatgtgatcttgtaccctaaaacgttgctgaattcactcattagctctagtagctatctagttgatggggttttctatatacaggatatcttctgcagagatagttttacctcttcctttccaattccaattcttctttttcttgcctaatcgttctggctagaacttccagtacaatgttgaaagtggccaaagtgggaacccttgtcttgttcctaatcataagggtaaaactttcagtctttcactattatgttagctgtgtttcataaatcccttaatcttgtttaaaaattgccttctgagctgggtgcagtgactcatgcctgcaccccgccatctctttaaaaaaaaaaaaaattcccttctactcctaatttgctgggtgtatttatcatcaaagggtgttgaaatcatctcaaatgttttttctgcatctgttgagaagatcctatggcttttttcttccattaatgtggtaagtaccactgattgcatttacaattatcttccccctacacagtaactttacaacagtgttcaccttatttttgtacccttagagcttgatgcactaagtactagagtgctgctcagtgaacacaggctttgggtggaagaactcatgaagataccacaattcaaaagttacgttaggttatatgttacgtgtgtgaccctggcagaaagttatgccaaaattgttcctctcccagcagaattttcatttttagcatttgcttcatggagaagctatctagacaagtgccttcccaagaggatattatgggtactgatttcaacaaaactgatctttgaatctgataagtgaaaatgttcaattttgtaagtatcttagtgtatgaggatgtacagatgcaaatgggtagtaaaacattttatagggaagaaggtaagatcagggttaattttttccaaggcaacccttcttgactctattaagcacccaatatatcaaagatttttctaaaaataaagatccataggtgcaattataatgttctcttaagagtttattataaaccagtttcataggccacaaggagataaaaggactatgtacagccttacgggaaacaggcagggagctgaggagggccaagatgagtctagggccttggtgggcgcattcccgggggagggggccctgtaagggaaaccagacaatcccatgagactccacgaacaacagcataagaaacaaacaggtctgtggtaacgtggccctgaggaatcgagcccacgcctctgcggagctacttccatactctgtggccaagggtcaaagaaggcctgaagtaagagtaagaagtttagtcagtgcctgatctgcaacttgaatccccaaccctgccccagcctcccacgccctgcagtaatcgagtgaggagaggggtatacatggcatatgtgctaactagggactactctgaggctgactgggttcctatgtctataaaaacccatagaggaataatccagactagagaaacaggggtcaccaagtttgcccatgggttatcttatagggaaagaacactgggcttggagtccaaactccctgggggcctattttctcatccatgtggggactgatctcagaatttctccaactgaagttaaagagaaatccataatagtacagcaaagcccagagccccctcttaattactaggcactgtcaaaccaaagagcataagacaatctcataacttctgttagggatcctcagaatgcattatttcattgtgtcctgaggccgctgccttagatattgagaaacaccctgggtgcatggctgctctaacttttctaagaggggaggtaagcccaatttaagaaatgttccctcttctctttcctttctggatttccctagatttaaggcttgaaagcccatgggatatgatctaaatgcaatcttccctccatttcctatcccactaggctctagggaaagaagccaaagtcaccactgcaggcacttacctcgcatcccagggggaggaggccgcattcccggagggggcatgcccattggagtccctcttccaggggggatccccattgggggacccataggaggtctcataccaggaggtgggcccatcatgcctgcaagagaaaagccccaagaatatagctcaagtgtctatcttgaaaaggtagcaaaaaaactacaaagctttccaccaagttctgagatagatggaccattccaccctctcagcagctcccagaaaactgacatttgagcctaacacccagggctcccaatggctcttgtccacctagtctcatcagtcagccacgctggatctcagagtaatcctgcttaattatacaaactcatcatcagcttcagtcaaggttatatctcatcattaatccagctaaggcatcttctatcaattagcactggtctccttatgggctcctcacctggagggggtgctcctcggcccataggtgggggaggacccccacggccaggtgggtactgggttggagccccggcaatactggctgtggcagcagctgcagcggctgcaacagtacctcttccttgtggggtcatcacctaagaggacataagaagaaagagttagaagagtacagtacaatgcagcttcccactctcctccccaacttggggaaggacagtgggaaataacagacaccaaatcccttaatgctacaactctcagcaccagacttcccatccaaaaccacatgtcgggaaagatcaagcttgaatgcccaactcccatcttctagacctgaatgtaagcatgtccaatccaagtgagagaaggcaactgcattttcaaatatgactcatgatttcaaatgctgtcatggaaatattttccttaaatacagttggctaattcgtacatctctttaatagcatcaacataatttacaatggcaacttatccttttcacttgcttctagggccatgtataaaccacagtgaaacactgatagtctgacaatcacaggttggtcactctggacccttttaaaactatggaccctcccctttatcctttattttagccaccaggaggtggtaccctttccccaactcctcacctgttgggatggcccgccaaccccacggactggcccagcaagtcctgcaggagcctggggcatgggaaccccagctgggattcctctgccagcagccctgccgatccctgggcccccggcagctccagcaagtggaactcgagcaataccagtctgaaaaataaacaaatatgctctgatgcccagtgatctgaagatcagaagtatactttggaatatcattgccaagagagcccctcgaaatagcttataaatactatcgaaatagcttataaatactacctctccatgtgtgccaacaccattcttcctccatccaagactatgagttatccctgaagcagggtagaacttaagagtaagtctagagaaacatgccacaactcaaccacctatatgcactcctgtgaaagttaaaccaagagcaaagggccagggttccactcagggttcagcaggcaaggcattaaagggacatgagatccattcccagctgattctaatccgctaggtgacaatggacaaataatcccacaatcccgggctgagttgccttatctgcaaatgacatggttatggtacaactggttgtgatcacaaaggtttatgatgggttatgttagaccagccaattctactggaagtaggtactaagagatttgaatatgtacatggactttgaaccaagatatgctaacatcccttgcagacatttttaactggaaaaggcaaaaacgtaaaaatctccaaaaaagaaaatgattaggataaactactctgtactcatttgagaaaatctcagtcattaacttgactttaaaagtgttgagcaactagaaaaatgttaacattaagtgaaaacacagaacaacataatatatgcccactatgtgttaagtacaaaaaaatccagataatatatgtggatttttaaaaagttaaaaggattattctcttttgattaaaataacgtcttggcagggcgtggtggctcacatctgtaatccccgctactcgggaggctgaggcaggagaatcacttgaacccgggaggcagaggttgcaataagccaagatcgtgccactgcactccagcctggcgacagagcgagactccatctaaaaatctaaaaaaaaaaaaaaaaaaaacccttcaaatgaaaaagggaaagggaaaacaaatttgactaggtctctaaagcctgctctatttctatgtgtagcttggtgtttacagaatcaagactgtctgagatcaaatgtcagtttcaccacttagtggctgtggcaccttgggcaagttactaagccctggtttattctatttataagatgagaatttatctctaaagagacctaaaggatcaaataaaatactgaagtggttggcgcaaggtagattctcagtaactatgaactgtaactgtacaaaacaaaatacacacatttcctattgtttcggagttacaactttttaaggtctacctaggctttgtcgtcacattaagaactgacccagatggcttcaggtgcttcctccactgactcactatgtacatcaactgagaaacaggtagagctttaaagtctgagatacccaaattctagttccccttttccacttctttcttgcagggtaacctcttttttttttttttgtctttttttttttcttcctttttctggagaatggggtctcgctatattgcccaggcaggtctcgaactcctgggctcaagctatcctcccgcctcttgcctccctgagagctgggattacagatgtgagccaccgcgcccggcctcttgcagggtaacctctttaagatttcatttattatctgaaaaagggggcaaaatccagaggatgcctgtgagaactgcaatgaaacagaatctaacacagagcctggctcacagtagggcctcccctcctccacaaggcttcctgctctgacttacatctttgggaggaggtccctctactgtcattgagaccagattctcccctcgcagcagcaccagaccgaggactcgcttctcttccctttctgcttgtttggagttctttggcctaaagagaggtttagaaggaacaaaaaaagtgttagaggtgggtaaagttcacctgcctagtggcctccaagatttgcttatactgcatctcctaacaaacagtacacaaactttcccaagatagccctcctggatagtctctacaggctgaacacataacctcttaggtggctatctacctgtttcctaccatgccaagaggacacactgaccaagagataggacaaggtcaacaaagcccagcccgggcccaaatgctattccacagcaaccgtgaaggcccttccctcagccaagtcttctttcttaggaccctattccctcccttcagcttaaggtcttgccaacatcaggaggctgcctaaacaattccaatcaaatgactcccacccacctcacttacgtgcagtgtccttctaatatcaattcaacctcacaggcctataattctgcccctcatcttacatcagaaataggagaagccatagaaggaaaaggttaagagaaatttcacatacacagaaattgaaatttcatatctgttcctcaaaagcataaaaacagaaacccccaaaaagcaacaaccagaaaaagatgaacaaaatataaatgtgaagtaggaaaaataactgcaacaggataggaaagtggggaaaaaagctaaagctagatcctaaaaataaaggggaaaaaatagcctgatttaaaaaaagaactcaaaagattttgttttgatattttacagtatattaactggttgtctgtggatggacagtttttcccttttttggctcacattttcttattttttaaaataataaccatgtattgtcctttcataattagaaaaaaacccttcggggtattttagtttctattcatagacttctttgtattttcaaaaatattttccaataaacattttttataatcaggagggaactttggagtagctccacgctcatctgttggcccctctctaatacgtacctggcaccaaggcatccctaccacatttttaaactatacttcttgaccttgggtcacagaagaaatcagccccaaggagaatcaaagggaattcaaagtgagtgacagaataatatggacactgcatatgacaaaagagctgctggccacggaagtcacatcatctttttgtgcctcaagtagccttgaatgtaaaacatgatgggaagctaaatcatatcttttaatgggccaaaagcttaagatctgtgagactcaaggcaagggagttagccaataacttacggaattgtagcaaagtagacaatatctccaattgtttgtataaatgccaacaaaaatcactggccccaaacccacatggggagctgagcacttaccctgaagagggtcagaggcttcttaaagcagtttcagaccaggctgcattgggagagccctttaggctacagctttacaaataggcaatgaggccagaaactcaagctctcccccctcacacacctgtggggagaacatgagagccctttaccccagtacccaggggcacgcaaagtgagagaaacaaaaagcctagcagcccttcacaacttgtactttgctagactagagagcaaggtttgctggactcaaaaagatttcttagcgttcaatgtccccatttaagtctgccctctaaaactggagaataaacagagaagaaccaactagctacatcaccacctctattgcttggcccacccactcaatccattcccatcctccagtctccgccccccacagtccactcctcacttgatctttctgaactcatcacagtcacagaggatcaaattcatgtgcttgtcaaaagccttgaaggtgccaatgaagatccggccgtcctgcaggatgcacctcatcctgtaatcaatatgctgcagcatcttgctgctcttgcccaccgtctgcaaggagaaatggacagggatgagactctgctcttttggacccaagcacctctggccctccccaaaacttcccatggcgttcttgtccatgtgtccaactttctcaacagattcttagctcagtctcccacccacagccttttcctaggaattctcccatgccaccctgttttagccctgacctctacccagtaatctgctattctctcttcccttgaaatcggtctttctcatattataattgcctttctccttgtcgtgtcagttgcagggatgagagtatagggtgtccccaaaataatccaatgcatacatactagagccatctaccagtgtgcagattatagatatgtgactcaagtgctatggaacattcaaatctcattaaaaacactgagtaaaggaagagctagaatagggctgaaactaaaaatctaatcaacaagaagcttgttatcaggaaggagatcagcttcaaggtgaaaaatgaaatccacatatcaagaatttgttagtgtgcctccaagactatatttggcagagggaaacttctgatggttagggtgctaaccagtttggacatataatggtctttaacccaacaaacatttctgctttcataacctgggttccaatgtgctaaaataaagaagtgactatataggtatcactttgtgaactgtcaggtaccctaagcagttgtatttctctctataaacaaatcacctggcatttgatctgtatatcatcctcccatcagtctgactgctatacccaagtcctaacccaccaagtgccttctatggacatctgttcatctctgtgagctcagacaacaaagttctgaacctgcaaatatgcagatcaaaaccttgactccatggccgggctcagtggctcactcctgcaatcccggcattttgggaggccgaggtgggcagaacaccttaggtcaggagttcaagaccagcctggctaacatggcgaagccccgtctctactaaaattacaaaaattagccacacgtggtggcaggtgcctgtaatcccagctactcgggagactgagatgggagaatcgcttgaacctgggaggtggaggctgcagtgaactgagatcatgccactgcactccagcctgggtgacagggaaagactccatctcaaaaaaacaaaaacaaaacttgactccacacaaagatactgcgagcctccctcaggttaggtggttcagtttccattcaatgaccattttaaccagcttctaaccacaagggatctgaacctttagggcaacattcactggtccagctcaactaatgtttactgggtgctcactgtgtatctggcactgtgataagcacagtacatctcatttaatccccaaaattgggcccattattatccctattttacagatgaggtcactgaggctaggagaggttaagtaacttgcccagtttcacagctgggaagctgtgttggaacctagacaaaatgaatccagcgcctattctaaccagttatccaaacaatatcctaccaggtttccctgcttccagtcccatcgaatatacatgccagagctagagcaatctttctaaacaccactaagcttatgtcattttgctggttaaaatccttcagtgggcagggtgtggtggctcacggctgtaatcccagcactttgggaggccaaggtgggtggattaactgaggtcaggagttcgagaccagtctggccaacatggtgaaaccccgtctctactaaaaatacaaaaaattagccaagtgtggtggcgggtacctacaatcccagctacttgggaggctgaggcaggagaatcgcttgaacccgggaggtggagtttgcagtgaaccctgatcgatccaccgcactccagcctgggcaacaaaagcaaaactccgtctcaaaaaaataaaaataaattaaattaaatccttcaatgacatgcctcaccaccactgaggtaaaattaacatgcaaggcctttagtaactagcctcctgccaattcttcccgtcttcccttctttcttcctttctcctccagcaactttttctcagtcaacaaacgcagaaaaatccagtaactttttaaatcttgttacccttcagcctttgttccttcagttctccgggtctgtaatattccccccattttcgccgggaacattcttgctaatcttttaggaatctgctcaggaaccatctatttgagaaaacattcttaccccgccccgctgccgttacttttaccgaatgaccacactgaattatattatgtgtccccagctacctctgtgaaggaagcaaacatatttcagagagtagccccagcgcctgagaagtcaggcacaggcaaacacggaaacgtgatgagcaactgagtggagctcttcctccattcgccatcaccctcctccgccctcctctccatccagcagacctagcgagactctagcgtggtccacgagccccttccacccacttccgccaactctttctcagactcacaaacttccgcaagtctgagccttttaccgggtccccctgcggctccagtgcctgctccgaagcccgggacatatatttattcggcaaaagttaacttagtgcctactgggtcccaggaattatggctacagcggtgtcgagagccgcggttctaccctcgcccctgccgagcgacctcggcctccgacaccggttccaaccttttcctcgaccccatgcctagccgaaccgccaaggtcctggtctttcccgcccagaccgagcggcctcggcccaggccttcaccgccctaagtggctccaacccacggcttcctccccgatcagtcgcggttcccactccacaacagactcggaagctcccgcgccgccagcctgtgccctccttaccatggtggcggttctgatggctctgatacccgccggattcgcctcctcagaggcctagcctctctcccacagccgatttcccgccgccgctaccggaaatgcagcaccacgtaaaatgcggtcgggtagaaacctacttccggtccagctcactagccctggagttccggccccggagcggagcttctgccgagcagaggcggggcctggggactgggcgttaacatccggctttgacgtaaggagagccttaagttcctgtttggacaccttcctagcttaaatccgtactgagagctgctctgtgtcacactcatttctcttcaccccgcctttcccattaacctctcggtcctcatttcccatcaccctccccggctctctcctctacagtcactattcttgcttttccctccactggctggacgtgctcctttttcagcccctctgcatttgctttcgcctctgcctggaatggtagtccccaaggtataccagaaggctgctgccctcacctctttcaaggtttaagcttaaataacattttcccagtgaggatttccctagccatcctgtaaccttcccacccacctcatcctcatctctcctgtatttccctcttgctatctaacacgctgtatatttttgttagttattttattatcccctccccattagaatgtaagatccataagggtgtgaatttttctctttgtgtattactcattgctgtagtgcctagaacactttagcacaaaataagggctctacccatatttgctgataatcgcatccagtcgtatgacatttattttttttctatgacttttttttttcttttgagacagagtctcagtctgtcaccaaggctggagtgcagtggcacaatctcggctcactgcaacctctgcctccccggttcaagcgattctcctgcctcagcctcccgagtagctgggaatacaggcctgtgccaccacactcggctaatttttgtatttttagtagagacggggttttgccatgttggccaggctggtctcgaactcctgacctcaactcctggtctcgaactcctgatccacccactttggcctcccaaagtgctggaattacaggcgtgaaccatcacactgggcccttcctatgacttttaaatacagcatatacacccaaggctttcaagtttgttcctctaaccttggtctcttcatttaactcttggccctttatatccagctgccagcgtgatgtgaatgtctaataggtataccaaatttaacatgttgaaaactgaattcttgattctattcactgtttctaaaaccacttcaccagtgttccccatccccgaagtttcttggattaaaaaagaaaaaaaagaaaatgacaaatttgaagcatatttcattcttctctttctctgccatcgaataatcaaattcatcagcaaatcctgtggcccccaccttcaaattatcttgaatatgattgttgtcacccactccattgcgtccactctagtcatagccaccatcgtctctgtcttggatcattgaacgagcccgtaacttgtctctttgcttcctttcttgttctcacggcagccagagggatccttctaaacgtactgggatatcagatgatgtcatgtcctggtctccacttaccaaaaacttcccagcacacatggaataaaatctagctctgcgctcctctccaacctcattcatctccgtcaacattgccctcattcatccttctccagtcacactaatctccttgctgttcctcaaacccagcaaggagagcttccaccttggtgctttgccatcttcacaccatctctaaagggtgtgttctgttgtcccgtttcctgtcacctgtagatgaagaggcgaagcctcatagaaatgaattatgttgcccaaagtggcggagtcagagtgggaatataggtccgtctggctcctcagctgttcatttgcccccaccttacccagctgcctaacacttcattcatgcatgcatttaaaatcatttttatttagcatctactaaggccatgcaccattattgggatagagtcctttccctcacggagctttacatcctactgagaaagacatagtaaaccaaataaataagtatgcaatgtaacattagagtgatatgaaaaaaataaataaaggcagaggaactgagagggatagggtacagttttggctaggtggtcaggggaaacttctctgaggagtggtatgtgagcagagacctgaacctacactcaggtctatcagaaggatgaatattatgaaggacattctagaaaatgtatataaagggaatcatataataatacgtggtcttttgtgactaccttctttcacttagcacaatgtttttaaggctcatccatgtcatgacacgtatcaatactccattcctttttatggccaaataacattccattgtatggatgtacagtagtccccccatatccatctttcactttctgtggtttcagttacccacaatcaactgcagtataaaaataggtgagtacagtacaagatattttgagaccacattcatataacttttattacagtatatttttataactgttctattagtattgttaatctcttactgtacctaatttataaattaaactttatcatagctatgtatgtataagagaaaatagtatatatagggtttggtagtatctgccgttccatgaatccactggtgatcttggaatataacctcctcagataaggagggaactaccatattttatcagttcatcaaatgacgaacatttggattgcttccaccttttggctgttataaataatgctgctgtaaacatcgtgtacaagtcttcacgtggacatgctttcattcctctttggtatccagataggagtggaatttctgagtcatatgataattctgattaaccatttgaagaactgccagactgttttccaaagtggcttcaccatgatacattcccacaagtggcgtatgagggttctgatttctccacatcttcacccatatttgttattatctgactttttgattcaagccatcttaatgtgaagtgctatcaatttcatcgtggttttgatttgcatttccctcatgactaatgatgttgaacatcttttcatgtgcttgttggccatttatatatcatccttggagaaatgcccattcagatccttttctcattttttaattggaccatttgacttttattattgagttgtaagaattctttctacattacagatacaagttccttgtcagatatatgatttatacaggttttctcccattctgtgagtttttttttttttttttttttttgagacagagtctcaccccatcacccaggctgcagtgcagtggtgcgatcacagctcactgcagcctgacctccaatgctcaagcgattctcccacctcagccttccgagtagctgggactacagatgcatgccaccacggtggctaatttttgttatttttttttttttttgtagagacagggtttcaccacgttgcccaagctggattcaagcaatccacccacttcagcctcccaaactgctgggattacgggcatgagccaccatgcctggccttttcactttcttggtaatatcctgtacaaaagttttttaatttggatgaagtctaatttatctttttgttgttgttgttgctcatgtttttggtgcaataagaaaaatcttttctgccaaatctaagattatgaagatttacccctttgttttcttctaatagttttatagttttagctcttacatttagatttttgatatatttttagttcatattttatatatggtataaggtagggtcaaactgtattcttttctaagtagatatacagttagctcagcatcatttgttaaaaagactcttctttcccccactgaataatcttggcaccctagtggaaaatcatttgaccattgacacatggttttatttctggacttccaattctattcctttgatctatatgaagtcagaaaaagtgtgaatcctcctcctttttctttttcaaggttgttttggctattctagatgccttgcaactcaattagtttgccaatctacaaataagggaaaagaggtcatgaattcagagccggggattaaacaggcaattcatctggtatttacttgataaaatggtcccaagtttcagtctagatcaggggcgggcaaacttttttaaaatatgtataagactggttagtttccaatattttttttgttaagggcagagagcattttagggctatcgagccatttggtctctgttgcaattactcaactttaccatgtaccatggaagcagctatactcaatacctagcaaatgagtgtggctgggttccaataaaatgttatttatggatacaaatagatgtcacaaaatattattatcctttaaattctttgcgaccatttaaaatgtaaagaccatttacattttgtgtaaatgtaaatgtaaagaccatttacattttgtgtggctcaaggccacacaaaaacatgtgatcagcaaggattggcatttaggctgtagtttgccaacctctgatgtagaccattagatttctgtgtctagattcagggtcacagccccagctgagtattcataattaatagttttgacttgcattatttatttggcttatctctgggctcaccaaatatatgcagtcaaaattcatgtcttttccctcattttaaaaacacacacatataccttcacacttgtatcaatctacgttcgacagggagacagaaaccatacagtaatttaaattaaagaattattttgccagggatggtggctcatgcctttaatcccagcactttgggaggctgaggcaggcggatcacctgaggtcaggagttcaaggccagcctggcaacatggtgaaaccccatctctaaaaatacaaaaattagccggctgtggtggcgggtgcctataatcccagctactcaggaggctgaggcagggagaaatgcttgaaccagggaggtggatgttgccgtgagctgagatcgtgccattgcactccagcctgggcaacaaagcaagactcgatccccaccccccaaaaaaattattttccaaagataaatgtaaatacaaaaagaaaatcctacagctgagggggattacccaaggataaacttggaaggagggttccctccccaaggctagggttcagtccttcttggagttgtggttgcagcctactggatagcagaaaagtttgagggggaaggttgtgcaggccagagttggtccacagtcactaagcaagcagaaataaccctctggggcacaagcaagccaaagctggcaaatagtacacagagggaattgggaatacagagagagctggggtgttgatgttgacacaaggcctggatcacatggtgtctgtgtggggaaggcctaaggaaacaacaggagccaaggttaatgggcggatgagcggaggcggccaaggcgctgctgtgggcactgctggaaatggaggctggagagctgcaagaacctagtactcttctgtgcacagcttgggctgggagacccaacagtggctactggggccctagtgtgcatgcactagagctggggagagggtcagtgtgggctggggaggctcaagcctccgcacaggaggaggtcaggtggtctgcttgctagacggccagtcccgtggggcccccagcatttgtaccagtgaggctgcagagagggtatggcagtggcctgggctggggcacaggcctgtgctgtttaggctcccaactgagccaccagtgcctgagtggagagctggacaaaacatactcctatggtggccaattggtagaaaaagctgtgtcctgcaggcatttagcacgggagaaaacttcactggccatggagtagagtaaaaatgggtactctcacagaggttgcagtgagccaagatcacgccattgcactccagcctgggcaacaagagcaaaactctatcttaaaaaaaaaaaaaatagaaaagaaaaaaaacaggtactctccaggacctggtgaaagagccacctgacccaagaaagaggacccttctccctgcagtgttgctctggtgccctctactgataaaccttatgccagctggcaaaggaaacacgtaaagggcccagatccattttcacagaccaggcaacacaagaatttgaagctcaaacaataagttgataattggcacaatttcacatacacacacagacgtactctaccacatagaaaggcacaatcctggacgcagatgggaaaaagaggacacccagtttgacttaccctctagagaagaaactattcttatggtaaacacagataagaggggtgttgactttctgcttggattcctggagtggtgagaactttttctcttttgcaaatgtgtctactgttcgaaagctgtgtttgtgagagtcctcttttacattcttgcctgtcttctacattcaggcaatcaccaagtgctttggagacaaaccctatgaagtctatcttctctttcagtccactctgctgttgccatagcttgttataaattttgcctggacaactgcaatacttctgacttcccagatttttactggtctcagtgctgtttatcacacttcctttcattctcttaagtttcctctcggattctctgcaatatctcttctagatctccagccccatatgaaattcctttgtcaatatattcagcagaaaatctgattggaaatgttttcatattcttactagctatgtcaagtgtacctccaatactgcacaatttatttactcaaagatttttacaggttgagcctttctctcaagacaggtgaccagatgcagtggctcatgcctgtaatcctaacactttagaaggccaaggtgggagaattgcttgagcccaggagcttaagaccacctgggtaacatagtaaaaccttgtctccattaaaaaaaaaaagacaagccacttttagtggccgtgacttaggagaaggtacaggcccttcttctttaacctaggttacaggttactagaacagacacagaagagaggaagctaagacaaaaacgattttaagtagcattaaaatttacaaaactcagctctctttctgccagccaaaaaatcgctttctagttcccaaaggaattggaaagcagggaagaggtaagaactgatggctggcagcagtaagggcgctgctgagcaactgctctacctgagagtgggccgagctggggaagctggactcggccttggggtctgcatcagtagcagatagagcatcacctatcctcatgtgtaacctggctttgtgagatttttctagtcatcaactattgccccataactcacagaaggaatgcttttacccttcaagaacactagttaggtagaactctaggaaccttgtttcattattttttttttttttttgggattctagaatgtcatgctccaaccagtcccaaatttctctttaatcaaagagcagctgagtgtttggctgttctccaaaatgatttctaggttaaaattaatgaataagatatggggctagataaaaataatctttccacgagaatgcagattttatcccttacacatttcatgcatattagagaaaataaaaaagcataacatggtatagaaaaagattatgcaatgagagaatctcatgtctgtcaagaatcctctaccattttctctcttttagaaaaaatgatttaaaaaattatatgtgcttactttgtttttgtttgaaacgaagtctcactctgtcacccagactgcagtgcaatggtgtgatcttggctcactgcaacctccatctcccaggttcaagcaattctcctgcctcagcctcccaagtagctgggattacaggcatgtgccaccacacctggctaatttttgtatttttagtagagacagggttccaccatgttggccaggctggtctcgaatgcctgacctcaggtgatccacctgcctcagcctcccaaagtgctgggattgagcccagcactttgggagttttggatttgagcccagcaccaggtgtgagccaccgcgcccggccaacttactttggatataggagaaatatatgcacagatattttgaaattaggttagagcttgcgtgtataaattatttcacctttaatctgaatcactttacctaatttcacaaccaggtgctgtcagattgcctgccatcttgaaagtcccttcaacccaaatcctttctgtggactcatcacacaaggtaccaccttatgactactccaggtagtcatatttctgtaagttttttggtcagatttcgttgtttctgctcattgcgattactaggtcaaatgtttccaaactaaaattgatttttttttttccccaaagagacaaggtctgactattttgcccaggctggtctcaaagtcctgggctcaagtgatcctcccacaatggcctcccaaaatgctggggattacaggcatgagctaccatgcctggcaatccactaccaatttttcagaaaactcagcaaaaatcaatataaaaaaaaattctaaaactaaaagtaaggtagaatgatggtgggttctgaactcaagaccatggtttgaaaaaatgggtaggacatggatagctaaattaaaaggccaaaaagaggtggagctcaagacttcttggagtgaggcttagatggtgaggccaggaaggatgcaggtagcaatctgactttagtttgagtcccccagttctctaaagtactccccaccccacccaatctggtcccctcattaacaggacttgtttggatgctgcaggcatttgaacacccatctcatgttggaaataagctctacacaaaaactgaactcttccttcttaggcaccaaagccatagtcctggagtggagaatttgcatctctctttcttctgagagaaactctagtacgtttcaattctgtttccttctgggatggagtggaaaggtcctgatagtgacccttcctagaaacaaaggaggggagtcagcacagcctgaggaagccccttccagggctggaaagatgacatctttgcccctctccctctgctgggctagggcaggcagccctttccctgggccacatctgaggtcgctataggttatgggggatttcagtaaaaaacaataattctgcatcatttttttctttccactccttttttcaaaagtaagagctagttttcttgtttgcttttttctttcccaatggtaggaggaatgttgggattgtccggaatggggagggcctaccccttccctcttcaaaaccctagagattatatgcctgcatatacttttccctcagtggcctccaattctgatcagaagttggtgttataggggcagttctggcaaagggtgggggcccacactcccagacatgcacatccttttccctcatcagacctgactgaggagccactgcgtaattgatgctatggtgtgaatgtctcctccaaaattcatgttgaaattcaattgccattatgatgagatttatgggtgggacctttaagagatgattaggttacgagggctgagccctcaagaacaatgccaatatcacaggagtggattaattatactggagtgggctcctgataaaaagggtaattccagcccccttttgctctctgtctcacatattcgcttgctctgctgtcttcaccatgggatgatgcagcataaaggcccccaccaggtgctggcaccatgctcttggacttcccatcctctagaaccataagccaaataagtttttgtacattataaatcactcagtctgtgacattctgttataacagcagaaaacagattaagacagctaacttcatgcctgggggaggcaagtggggagaggccttggagccagtaactctttcttttttcatcctctccttgaatgaggtgtccaaaacacttcatgcttcttctgattttccaagcctgatatgcattttatggatcttgcaaactccaattgggcaaacaaagttgctggagcctaggaagaccctctccagtgaatagttattggtccaagacagaaaatcagagccagggcatgtggagtttattcaaaagtctgggcaatttgggctctgagggaggaagattttaaaagggtgtggctaaagggcagatccttggcctgaaaaacaatggacggagtatggctaggttgcctcagaccagttattaaagggatgatgtgtgggtatcattagcaggactgggccctagaattggagggccaaggggacatggtatcggagctatgtttaggggtctttacatctattattgttgatctgacatggggagtagctaagaggcccaaagcaatgactcatgactagagaacagtttgggcatggttaaaggacctgcctctgcaatctggaaggctgcagaggggatgtggttaaagggtccctggaactggaggacatgagcagatcattaaggactgcaaaaattcagtggaatagagaagtattcagcaaagacacctgcagaaagaaagaaaaagagagaaggcaagatggggagagaaagagaaacacacaaagagagagagagaatacctagggaaggaagctttcacagaagctgaagaaagtgatcagtctggagaagaggcagcccagccctggagacctggaaaatcccctccctgcaactggcctgtctctagaacctaatcactcctccacatgaaaaggatcaaattctccaaaaaaatctattagattgattctcaagggttgaatttatgcaggaaaccctgactgtgaatttgaattccttgcaccctttcagtcagatgagtggccaagctacacagcctgaacttattgaagaaattttgaactaaaacaaagggataagaaaacacgggaaagaactggtatatgaaaataaaacaagttgatcattttttgattacttaaataaagcctgcttttttatttcatctgattccaagaagtagaaaagaatgcttatttaacagttactgccatcttcgctcacatacagagtacatgggggagtcaagacatttcctgaaaatccctcagaggtgagtgaggtagtgacttggggtagcaagactgtcctcctaagtcagttgaggagtgacatcgggatgaagctccacccacaagccctgcccacagaggtcttctccctgagtgtgtcctcctttagtacaagatgaggtttaacttattgctaatgtgtttcacattttccctccccacccatgtaaagcttgtcccaaaaaagctgttctttgatgaggactttttcctaagtccttgtccattctccccacacatgcagaatttctattcaatatactctggggcttactgcggggtgactcatggctgaagccttatctacactccttatatacctaacatgtcttagaatcaattatctggacagacaacgagacagaaaattgaggattcactggggagtgagggcaggactgggcagaggaagaagctgacctgcaatgtgtctgcaacccagtgatccttcagttcgatggggatctctggatctggaatgaccttctggagttgtccccgttgagtcaagggttggggccagaaggtacccctgcaaaggtgcattgcccctgtggtgcatgcagctccctgtggctgagagtgagttccagagcggagtgcatctctggaatgcatctctgccagcagcaacactgttctctcaagcagctggggtgttacccctgaaaaggtcatctgggcagagctccacagtgtccccacatgcagattctccctgtggtgtgtgatcacaaaagctttgcccatacatcctacaaacaaagacctccttcctgagggccactctgtgcctgagtgtccattcttttactgatgctccccaacactccccagacaagggtgctttcccctgaggctgtcattggatgtctggtaaatgttgattattgctaaagccttcccacagtccctacacataaacttctctcctaagtgtgtccttttgtgcatgctcaaggctgactgatggctacagttgcccgtactctatactcataaggctcctctcctgaacgtgtccctcccatgcctgataagggctgacacatctctggaacttcactcacaatctgtgtacacagggtctactccccatgtgtctctctggggtaacatgaggcttgactggtcactcaggtcttgttcatgacccctgcatacacaggtttctcccgtcagtgtgtcctctggtgtctgatgagatttgacttatgactaaagcctcgcccacactccctacaaacataatgcttctcccctgagtgtgtcctctggtggacaaggaggagtgatttccggctaaagcctcggccacactcactgcacacgtaaggcttctctcctgagtgtgtcctctcatgtacaatgagggttgacttgtcacaaaagcctcgcccacattccctgcaaatataaggcttctcatttgagtgcgtcctctggtgtctgatgagatttgacttctggctaaaacctcgcctacactccctgcagacataatgcttctcccctgagtgtgtcctctggtggacaaggaggagtgatttccgactaaagcctcggccacactcaccacacacataaggcttctctccagagtgcgtccgctcgtgtatgatgagggttgacttgtcacaaaagcctcgcccacactccctgcaaacataaggcttctcatccaagtgtgtcctctggtgtttgatgagatctgagttctggctaaagcctcgcccacactccctgcaaacataaggcttctcccctgagtgtatcctctggtgttttctgagggttgacttatcacaaaagcttcgtccacactccaggcacacatagggtttctcaccggagtgtgtcctctggtgtctgatgaaggatgacttctcgctaaagcctcgcccacactcgctgcaaacatagggcttctcctctgagtgagtccactgatgtctattgaggatggacttacttctaaagctttgcccacactccctgcacaaataaggcttctcttctgaatgtgttctctggtgtctgctgaggttggacttctggctaaaacctcgcccgcactcactgcacacataaggcttctccatcgagtgtatacgatggtgtctgatgagggttgatctatctttaaagcttcgcccacaatcactgcaaatgtagggcttcttccctaagagggtcctcgggtttgtaataaagtttgattccaggttatggtccggttcatactctctacagttgattgctccaaatctcaaggtttctaattccttcaagcctttgtctagctgcacagggtttggtctttgggctgagctgggctctgtttctaccaccatgttgccttttctaggacttgctgactgtctttggagtgggctggggaatgcccttgaggtttctctctcctctgtccttgcagaccagggtttggagccacctcctctctcctgaccttctgcattttcaaaccaacagcttacatgggaatactgctgcccctgctgtttccaatgccctgggctagaattccctggatggaagtgattttctgcacataagcccaggaagatctgaagtacatgttgactgaggaactgctgacaggagaaggccagaaggcaggaggaacaagtgtagatttctggctttggttctgctgaagaatgaaagttttctgttagagtagccataagtagggctgctgagttgttctgccttgtcttaggacagagaatgttttactgccatgcctataattgataatataagtataacacaatttgcttctgaacaatgattcctttacattccatcacattttctattgcaatccagaaaatccataacaaaaatatcttgagaaaccaggaacctctcaagtgagtattctgctctgtaaacagcttcaatcatagttagccttctcctaagccatagacattcacattggtatatactgtccacagctctttgttctgcttggagatagtggtctctatgacacatgtggaaatctccttcatgacttttcttattatataaaaaagggtctgatagacataaaaagtccctcattctggagggcttccgaatgtaggagaaagtgtatggaatactggttaaagaaattattgtatataaaacaaatataaatttcaggctgcccacctgtaaacaaagacttattagaaaatgccaaagtactaggttctctactaagtattatgaattcagtaatgaacaagaaagacatggtccatgattttaggattctggcaccaagccaaaacaacaaaatctgcctttctttccacttttcataaatcagtaaaaagaaaaacttttcatttacagcagcacctgcctacaaaatatcaaaactagatgttgcatttcatcacaacatgatctatccaactgatgctgagaaatgaccacgtacttggccccagaccctactgggcctaactgaagacttctgcctaactaatgaacactggaatctttataatcaactgtatctgtccttaaaaactcatcctatcctatctggaatgctagttttcaaaccttaattagcataaccatcatgaaactgctccctaacagtaaaaccttttatttttcccccttgccaaactatacagtgaatttcttcactgctgtgtctcctttcctgttaagtaaatgatttgtgccatttgattttttgaccttttgtggtctttgttttagtttttgacaatgtgttttccctttggttgctctgacaaggcaccgaccagtgctggaactgctggactgccagaggaacacagctgtgtgtagactgagccgtatgtgctcaaagctgcttgtctggcagccttgccatgggtgaggctctcagcagctgtcaggctctgcttgctgtcactgagcactccctgagtctgtttggtttacttgggttctcaaagtaactcattatttgtttctatttctgacccgtcatctcttataagacttgtggtcattctggtactttgtgacgtgaactttttgccttgatattttgactgtgattcgctgccatctttttggattatctagaagcataccaagtcattcagactgcagtctgaatatatatacggcagtgatgtaacaccctacatcactgagaagcatttcagtaggagaagaaatctcatttgtgtctattttgtgtcaaacactggaaccaaaagctccttacacttaacaccctgttaaagggaccccatgtatactcactatgattctaatccctacgccttactaggaaagtatcatcatttcactaaagataatttagatttactgaggccattttgaggaactctgttttctatcatgcccctttgctatataataattcagtatatatttctaaagaactatatagttgagagatctgtcttgcatcatcaatatatttactcatttgcttaatcttaaaatgcaaggaataaggccgggtgcagtggctcatgccagtactctgggaggctgaggcaggtggatcacctgaggtcgggagttccagaccagcctgaccaatgtggagaaaccccatctctactgaaaatacaaaattagccaggtgtggtggcacatgcctgtaatcccaactactcgagaggctgtggcaggagaattgcttgaacccgggaggcaaaggttgtggtgagccgagattgcacgattgcactctagcctgggcaacaagagcgaaactccatcttaaaaaaaaaaaaaaatgcaaggaatatagtttcagaattgtggacccacatccttacaaaacacaaatatacaaaatatagtccatatagttcatgcacttctttgtcaatagagaaggagttggccaattttttctgtaaagaaccagagtaaatattttagggtttgtaggtgacatggtctctatcatgactgcttaactctgccattgtataacaaaagcagccataaataattcattgttccaaaaaaactttatttacaaaaacaggcagtgagacagatttggcctgtagaccctagtttgccaaccctcattttactatggagtatggtcaaagctctctgttaacggggttgttttcccctgttacctgtggtcgtgttattattttggaacacagttaggtaaatttgtttctctttgtattcgattgtagggattttccctctctttgttgatttaattcctttctttgagtatttaaacactaacatgctccaaaagtgcaaaactattcagaaagggcatgcctctcctttccatagccttccagccaaatcccacatataacctcacagctaaccaatctcattagtttctggtttattaaccctgtattactttgtgggaaaagaaaaaaagaagaaacagatatgcatatgctcataatttctcacttttaaaaacactctttgcacttggctcttttcacttaatatatccaagaatttactccctatcagttcagaggagctcttccccattttggaagtcatgtatcatcacttcttcaaccaatttactacataagggcaattaggttactctgatcttttatacagaaacaatgctacaatgaataaccctgtacaagtgtaatatctttggagatgaatcttcagggtaaattcctataggtaggattgccaggtcaaagcatatgcatatatagtttcgttacatgttgccaaatttccctccataatggctgcagcatttctgcattgccatctgcagtgtataaggttgcctatagccctcagcttagccaagtgttctgtcaacctttttaaatgctgccaatggtatgttaagaatggtgtgtagttttaatttgcatttatctaattagaagtgaagttgaacaccttttcaaacatttaagggacaatgttatattttattttgtgaatcgtctatttaggtattttgcctattttcttcctatctggttttagggttcttctctttgaattttaagattcattctatgttatggaaaataactctttatatgtgatatactgtatgtggcaaatatttcctggaaattagtcctttcttttgactttgcttacagcgtcaaacttatcactcttcccttctaggcatctggatttttagccaaatttagaaaaccttttcctgtgtccaggtgatagaatatttacccccatcctatcctagtgtgtttacggtttaattttttacatttagatctctagtcatttgggatttttcttgtgtatggtgtgtggtatatggtccaatgttatgtttttccaaatggatatctagttgcccaacaccatttattaaaatgtccatctttactccaggaatttgagatgccaccttcatcacataccaaagttccataagtacttgggttgacttcttgattccactggtctatttgtctagtcatgggccagcaccacaatgttttctttctttattttctccttgcagcttcaactcaaaggacacattttaattctaaaggttttgtagcatattttagtgtctgataaggatagtaccctgttatagcttttatttttcagtgcattcttgcctatttttccacctttatttttccatgtgaatttcagaaaagaatttcactgttttattgggacatgttaactttatgaattaccttagggataagtgacaacctgattttaatctataaaaatattttttgaggccgtgcattgtggctcacacctgtaatcccagcactttgggacgcccacgcaggtggatcactttagaccagaagcttgagaccagcctgggcaacatggcaaaaccctgcctctactaaaaatacaaacaattagctggcatggtggcatgcacctgtagtcccagctactaggaaggttgaggtgggagaatcacctgagcccaggaagtcgaggctgcagtgagctatgatcatgccactgcactccagcctggatgacagacgtgagaccctgtctcaaaatatatataaattttttttaaatcaaagaaatttgaacacagatttcgtattagataccattaactttgttgaacgtagtaatggtattgtggttatgtaagaatccattttcactttttagagaaatgtggtatatttaagggtgtcgtgatatttagaattaactttgaaataatttggccagaaagggagaagtgaatgataatgcaagctggtaatgtgttaataactattaagtctagataattcatgttcctccttgacctatcagccctacgaacacttatttctcagattcaacctaagctaccctcttgtagcaaactgtattttgctcataatatctgctgttcctccccactgagcccatctctgaagaaggattctctttcccaccacgatgacatcagacttagctgtgggatttgctttggccaatgaaggttagtgggaagttaatgcactttcaaacaagtgttaagagccaggatgtggtcccatcattgctctttttccctctaccttgagaaccccatgatccagacagaaactgctccttttgcttggatcccagaaccaaaatagctgaaccacacctgaagtaaccaagaggtaatgtgagaaatgagcatttgctattataagccactaaagtattggggttgtttatcacagtattatctggcctaagcttattaaactgtctcccctgtgaaggctttaaagattatttcagaaagaattggcccattatttctaacaatgcccttgaagaaaagacattaacatgaatatgtgaagaaagagagaaaaagagactcgggccgggctatggctcacacctgcaatcccagcactctgggaggctggggtgggtggattgcttaagcccaagagttcgagaccagcctggacaacatggcaaaaccctgtctgaaaaaaaaagaaataaagtaaaataaaagaaggaaagaaaaggaaaggggaagggggaaaaagcgaacaaaggggaaaatggaaagaggaaagaaagagagagactggtttaggaggaaaaacagtatgctctcaagtttttataactttgagaataagcttgtggttgcaggcaaggagaaagatggggatgaagcacaggtgagacagcgatagataatggcttcattataatgtgtgatggggaaactcattcaagttctcaaattgttaaatggtgtgaatacaaacacagaaaaggagtatgtgacactgactcctacggacccctgcagcccagagaaaagaaaaagaaggaagggaatagcccaaaagagagacgtcagaggctggagactgcggaacattatggtgtcaagcaagacaaaggaaacgatttcaaggaatgcaattgggatccaggttttcaatatcaagattcatttgaactaggtcatttgtttgtgtgtgtgtttgtttgtttgtttgctgttttatgggtcttttttttggtttttgtttttttttttgagatggagttttgctcttgttccccaggctggagtgcaatggcatgatctcagctcactgcaacctccacctcctgggttcaagtgaatctcctgcctcagcctcctgagtagctgggattacaggtgcccgccaccacacttggctatgaaccaggtcagttttaacattttcctctgaatcagttatatgtattaacagtggaagagaaaacagtatgaccagagaaaaataaaaacaaaacctagttggactaaccagctaaggccaaatcaaaacacacaaaaccatttacaaaaattataaatcatttttttaaaaggaaaaacacacacagaacgagtccgaaatggatgaatctacagtgatttagatggagccaggtcagatgggcgctagttcaaaccagagcgaatcagatcaaaacacatcaaagaagatgaaaatggaataaagtaaatctgattaaatcatatcagggaaacagccacgccatttggagcaaactcccaaagaaactcctccctgaaactggtttgtgtctccaaaaatgtgattcttctctacatgttttatctagaaacataggaatatctagaacagtactatccagtatagcagccactggccatgtgctcattgagcacttgaaacatggctaatctgaactaagatgtgctctaagtgtaaaatacaaccaggtttcaaagacagtacaaaaaaataagtaaaatacctaattaataagttttatgttaatttcatgttaaaatgatattttaatatattggattaaataatatatatagtcttaaagttgatttcacctgtagttatacttgtaaaaatgtggttactaggaaatttaaacttacctatgtggctcacattatatttctactagacagcactgatctagaacaaggagtggaaaatgactacccacaagctaaatccagtcctctgtttttgtatcacctacaagctaagaatggtttttacatttttaaatggctagaaaaaagtaaaaagagtagtaatatttcatgatacataaacattatattaaattcaaatttcagtgtctataaagaaagttttattggaacatatcaatgctcatccgttcacatactgtttatggctgcaactcaatggcaagttaagggttgttacagagggcttatcacctgtaaaaacagttattgtttggccctttacagaaaaagttggccaacccctgatctagagttatgttgcaattgataacatttatcaacccagatttaaatatttttttatttttttttattttttcagactgagtttcactctgtcaccaggctggagtgcaacggcacaatctcggctcactgcaacctctgactccctggttcaagtgattctcctgcctcaggctcccaagtagctgagattacaggcacatgccaccatgctcagctaatttttgtatttttagtagagatgggatttcactatgttggccaggatggtctcgatctcctgacctcgtttaggtttgtaaacaaatgaaaaagaaaaaaacatagtttatgaaacccccaaaccacaataaacttgactcttaattttaacttatgtcacagagctgcatctctcccccttgcaaaccatgcccccagccttgcttgcctccttgcagcttcatatactgggcaggtacatcccttcattaaggtcttcgtgtcaataattcccttcacctgaaatgctcttacactagatacctacagttctaacctcctcaccacattatgtctttagacaaatattacttcttcactgatttcaaatacccagttttaaacttcagccagccaccctatcacacccaatacccctttatcctgccttatttcattattttttactatgttgcacttatcaccttttaacataccatattataatatccctgtatatgaggctttttgtttgttgtctgtctccttacactagaaagtaagccccatggaggcagggattacgattttgtttactaatgtgttgtaagtatctagaacatttttttgtggtacatattaggtgatcagtaaatctctactgaattaatgaaggaaaggaaagaacacagccttacccaatgagagaagattcctgtaattctccagcatcacttctttgtatagattcctctgctctggactcagtctcttccattctgcttctgtgaagatcacagtcacatccctgaatgtaactggtacctacaaacaaccagtaaattaatgtatagcaagccaccatcaatcttccctgtgtgtggagcacagctggtgaccctggagagcctggatatgcaagttgatgtaattcgtcagaatatatggttctccatatgaagttcttctgagcactactgtctgcctggctttctgttaaaacctgtgaggagcataactgagcacagaacacattctaggcccttgacatatatgatttcaccggagaaatgatttgtgaattaatttgtaaacctcaggctgtgtttaagacagtgactttgaggattcataatgaaggaattcagagatgaaacagcagagaatgggctgcagaaggaacaaaagcatcatggacttggggcttgtgctgggcagtagggagtggtaaagatttagaggagagaatggaagaaaacttggattacagagaaaaatgggagtgaacagatggggtctggaatgagcattttttaaaagctcaggttactaaatgggatctgtaaaatccctgtctttgctatgtgctttgacaacttttttcaagaaagcctaatgcttcactcatctacccagatgttgaccgccttttcctttcccaagaaagagaatatatgtctattctctggaaaatgagccagcacttcaggaaaaaaaaaaaatgtaaccccaactcaccactatttgggcctttccctcctttttctgggggcagtcagtatcattagaaggcaagcctagggaaagaaaaagaagctatgagaaaccagacccccccaccccccaccccccaccatgacgctccctgagcagctcttctgagccttaggatgaaggaagtagtcacttaactcagaggtgacctctgaagcattttcaggtgaacctggagccttggcttcctcttcatccctccggctccctcaacaattctcacctttcgctttatgattttgggtcaatttcttcatagtctctacattttccccattctttggaagcaaaatctcttcccagtattgatctcccagtgctgaaggataaggcaacatcatggcgccagagtcagcccagtgtgtgccttgaaattctgccagaggtccaggtagatgttatttcatctcaagatggagttctgctgcctgtggtgacttcttccaaccttaattataaaaagcccagcttgtttccctgcagccaggacctgtgggatgaagaagcaatttgctattgctggggcttttattgtgggccctaggcctatgcctcttcaacagggatcctgtcctctcacaccctcctcattcaacaaacacggagtctccatctacatgggatccctggattttctaccttcattcactctaccttcatttctaggccctcctgcttgtgttctgccactctcccttagctctcaaactttacttcttctgcctctgcacctcagattcaaactctatgttttggatcagtctctgctactacctgaagcctgagtcagagagaagacagaatatagcataatgcctgtggagaaagagcctctgactgtttcctgtagaccaactggggcgtgcagaactcagcttctgattcccctgccccaacccaaggttccatctatattcagttccttgtgtcttggatgggcacagtggttcacacctgtaatctcagtactttgggaggccacggcaagctaatcacttaagctcaggagctcaagaccagtctgggcaacatagcgaaatgccgtctctacaaaaaatacaaaaatcagctgggcatggtggtgtgcgcctgtagtcccagctactcagcaggctgaggtgggaggatcacctgacctcgggaagtcgaggctgcagtgagctgagatcatgccattgcactctagcctggacggcaggagtaagaccctgtctcaagaaaaaaaaaaaaaatccctatgtccctgtattgtgaggagtttaggagatcaaaactcagtccttcttagttaagggagagctccagttctcacaattactctgaagagataacctcctagcttccattgctatgcatgtctaccacatgaccttaccacagatgtgcatttgtgtatcctgatgggcccaagtcaaagtcctacactgatgtggtcccaaagaaggcaggtggtattaggagctatgccaccttcaaaagctcctcagacgctgtccaggatttcagcccaaatggctacaggcctattgttgcctagtacccttctgagactagctggggtctctaagcagctcttgtaattcatccctcaacaccataggtagagatgaccactccctcttctgtccaacctggccatcataccatattgcaatttctctatttacgtgactgtctttactaaactgtgaagcttcttgtaagatgaaatgcttctcagtctttttgctaatataattctagtgattagaataaaagaggcctttgtggtagattttatcatcgttcccaattatttgttgccctataaaaggatggtacttccctgtcccagacatcaggcttgaccttgtaacttgccttggaaaatgaatgtgagtgaaagcgacgatgccatttctaagcattgcataattccaccatttcttttgttctgagaacagcatgtccgaagagggactgtggttctactgtaaaaagtcatggtacaaagctaaagccaacctatagtacctgcagtataacgtagctgaagctgacaaagcctttctcctagtaacactagtatctgtagctaacagttataaagcaagatctgtactaagtgcagacttttttttttcttttttcttttttttttttttgagacagagtctcaccctgttgcccaggctggagtgcagtggtgcaatcttggctcaccgcaacctctgcctcccaggttcaagtgattcttttgcctcagcctcccaagtacctgggattacaggcacctgccaccacatccagctaattgtttgaatttttagtagagatggggtttcaccatgttggccaggctggtctcgaactcctgactttgtgatccgtctgcctcggcctcccaacgcgctgggattacaggcgtgagccaccatgcccggctactaaatgcagtattccaacatttgggacactgccacaaatgcaacagaaaaaataccagcactcgtgtagctgccattttagtggggtttaggggcaaggagatggacaaaaaaaatatatacctcagaaaagacacaagatatcagacggagataagtactgagggcaccagaaggatccagtggcagagactgaaggagttgcaattttaaatcgagtatttaaggaaagccttttaaaggtgattacttgagatttgaacaatgtgagggagtgattcatgtgggcaactgtgtcagtagaactataaggaaagaaaccagcccattgaaggtcctagggcaggagtgagccctgctatttcagaaataacaagttcactgtggcaggagggtgtaagtgaaacacagtggtggcagttaagagcagtcaacgacagcggtaccagggcacaggtcatgtgcagccttgagcatgctggttttgatgtggagggaaatgagaagccattggagtatttggagcagaggaataacaagcttggatttacattttaaaagatgtctctggctggtagactaggaacagacaaaggggacagagaacaaggagagaagcaaggaaatcctgtaaaggctgttgaaataattcaggtgggagataatggtggtttggacgaaagtggacacagtgtaggtggtaaatagcaatcacatcctgaatttccttattgtatgtcagttgtgagatgaaaaaaaaatcaaagacaattctagtatttttgcctggagcagttggaaggataagacttaccatcagccaggcacggtgactcatgcctttaatcccagcactgtgggaggccgaggtgggcagatcacctgaggtcgggagtttgagaccagcctgaccaacatggagaaaccccatctctactaaaaatacaaaattagccgggcatggtggcacatgcctgtaatcccagctactcgggaggctgaggcaggagaattgcttgaacccgggagacagaggttgcggtgagccgagatcgcaccactgcactccagcctgggcaacaaaagcaaaactctgtctaaaaaaaaaaattttaccatcaacaggtgtgaggaaagctataactggagcaaattttgggggagaagaacaaagtttgatgtttgagactaggtttgagatgctaaatacagatccaagtggagattacaagtaggcaattagtcatccaatactggaggggaaggaagaggtctacactagagtcatatagatggatttaaagtcctcagagtggaggagatcaccaaggcagaggaggaagatggaggaattgtcaaggactaagctctggaggactccacagttaggaggccagggaaaaaaagaaccgtcagggaagacagagaagtagcctgtgagggagggaagaaaaggagaggtacatacagtactggagccaagtgacaaggtgtgtcaaggaggaagaagagatcgaccacaggaattgctgccaagaagacagagtaaaataaagactggaaattcattcctgtgtttagcacagtagtggctgctggtgaccttggcaagaacagtttctggagggtgagctacaaaaggatttaaaacagaatggaaaaatagaactggaggcaacaagtatagaccattcttttggggagttttgcaataaaggaaagcagagaaatggggtaatagctgaagggagagatcacactcaaaagtagctcaaaaccttcaagtggttccctgatggccacagagtgagtccaactcactaacttggtatcctggcctttcttaataatggcccaacctacttctcaatctgaaccccccgtacccacccgccccggctccttcatatggctcctccatatggctcctccacggccaggaagcagggctgctcaaatgctcacgaagactgatttagtcctgctagttgttaggcactgtgtcagtgacccaaaatgagcaagaggtccctgatccttaaagagccacttcatggtccagtgagggaaagtactcatatataaagtgcttcaggccaggcgtggtggctcatgcctggaatcccagcattttgggaggctgaggcgggtggatcacctgaggtcaggagggcaagaccagcctgaccaacacggagaagccctgtctcctctaaaaatacaaaattagccgggcgtggtggcgcatgcctataatcccagctacttgggaggctgagaaaggagaatcacttgaacccaggagacggaggttgcggtgagccgagatagtgccattgcactccagcctgcgcaaaaagagcaaaactccgtctccaaaaaaataaaaagtgctttggtgctgaagaagaggctgagggcaactttccctgagaaaatcaaggcatgctttgcaatggagtaaatgtgtgactaaatcaataggagttcaattgccaagtagaaaaccacagaggaataaaacagcacagaatggaatctattcccacacagctacaagggcactacaacaaagggagtaagtggtagggacaagactgaaaaggtgagctgagagataattcagatattcatcagatatcaatattaacaatcccagtccatatttagtaagcatatattatgtgccaggcactaccttataggaattatctgccaggccgtataggaattaccacatttcttcctcacaactccctgagatgggcactattattttctccattatacagatgaggagtagaaagcacagagagtgaaataatgtctccagggttacacagctaatgtgcggtgaagacaggctttgaatctaggcaatctgtctccagagcccacacccaggctgaagcgcagtggtgtgatctcagcttactgcaacctccactttccaggctcaagccatcctcccatctcagcctcctgagtagctgggaccacaggtgtgcagcaccacgcccagataatttttctatttttagtagagacggggttttgtcatgttgtccaggctgagttcaagtgatccatcacttcagcctcccaaagtgctgggattacaggcgtgagccaccgcatgtggcctcacactctaattattgagtttggacagagttggaggtaggtaataagaaatggccctcttccgggcgcggtggctcacgcctgtaatcccagcactttgggaggccgaggtgggcggatcacgaggtcaggagatcgagaccatcccggctaaaacggtgaaaccccgtctctactaaaaatacaaaaaattagccgggcgtagtggcgggcacctgtagtcccagctacttgggaggctgaggcaggagaatggcgtgaacctgggaggcggagcttgcagtgagccgagatcccgccactgcactccagcctgggcgacagagcgagactccgtctcaaaaaaaaaaaaaaaaaaaaaaaaaaagaaaaagaaatggccctcttgagtaggtgagtggcatgatccttatttttccttcagaggagcaacttaaaaggcagggtggaaggtgaactagaatgtggagaaaagatgaaaatttgggtagcacaacagtgagatgaggggaaaataataaaggggtattccaaggtagaattgagaggactccatcactaattagaaggatgagaatttcaggaagaacaaggaggcaagaaagactcagagctccggctggtgaccagggatggagacacggtcattaacagaaatcatcaacaggtaaagagaaaagggagtgggagaattggccttgctgaattccagatacttctccctcttatagttcttacctgaattgttaagtgtgtacagtttgaactaagcaatagcaattttgtagaagaaatgggcagattttaaaacaatctagagttaagacattaaggaattactgtcgattttgttgaatgtggtaatattatggttacatttttaacaaatagtccttctctgttggaaatgcataggatagtatttataggtaaaattatgtgatgtctgggatttccttccaaatactccagcagcaaaaacaagaaaatgaggaggtggggggctcaatgaaacagggattatagaatgttgataactgaggaagctctaaatcctaattctacccaacccggtcatattacacaagtaaatttcttaacctcttaacatgccacttcttcttctatcaattcagagttttgattcctaactttcaaattgttgagagtttaaaatattgtggagactataaacccagttgcctggcacagaacaatggcccaataaatgctaattaccatcattttttatttcacagtagctgacaaatccctgggaatccagcagccaagatgaaatatggctggggcaaggacggtgataacctgaatgagagtaccagtctggggtaatattccctgtggagatccttgcccttaaaatcaccccagtattgtagaaaaacaagcaaggccttgagcctcaattggaacacttcagggtacaagatgtcagacgggcaaaggaaatacagccatggtttcgagcagaaaagacgctatgggaatgtgaaaggtaagtggtacctacctgataggaagttctcgggagcacagaagtctttcctttctcaagagatcgtcctctcccagcaggcagggattggagaaggtggacctgaggatgaaacaggcagtgtgagattcaggattgtctcctaccacccagatatggaggctagaaatccccaagtttaaaatgagacgagccaagatggccgaataggaacagctccagtctacagctccgagcgcgagcgacgcggaagacaggtgttttctgcatttccaactgaggtaccgggtttatctcactggggagtgtcagaaagtgggtgcaggacagtgggtgcagagcaccgagtgttagccgaagcagggtgaggcactgcctcacccgggaagtgcaaggggtcagggaattcctttcctagtcaaagaaaggggtgagagagggcacctggaaaattgggtcactcccaccctaatactgcgcttttccaatggtcttagcaaacggcacaccaagagattatatcccgcgcctggctcagtgggtcctacgcccatggaccctcgctcattgctagcacagcagtctgagatcaaactgcaaggcggcagcgaggctgggggaggggcacccaccattgctgaggcttgagtaggtaaacaaagcgtccaggaagctcgaactgggtgaagcccactgcagctcaaggaggcctgcctgcctgcctctgtagactccacctctgggggcagggcattgccaaacaaaaggcagcagaatcctctgcagacttaaatgtccctgtctgacagctttgaagagagtattggttctcccagcacgcagctggagatctgagaatggacagactgcctcctcaggtgggtccctgacccctgagtagcctaactgggaggcaccccccagtaggggcagactgacacctcacatggacgggtactcctctgagacaaaacttccagaggaacgatcaggcagcaacatttgctgttcaccaatatccactgttctgcagcctccgctgctgatacccagtcaaacagggtttggagtggacctccagcaaactccaacagatctgcagctgaaggtcctgactgttagaaagaaaactaacaaacagaaaggacatccacaccaaaaccccatctgtatgtcactatcatcaaagaccaaaggtacataaaaccacaaagatggggaaaaaacagagcagaaaaactggaaactcttaaaaatcagagtgcctctcctcctccaaaggaatgcagctcctcactagcaacggaacaaagctggatggagaatgactttgacaagttgagagaagaaggcttcagacgatcaaactactctgagctaaaggaggaagttcgaacccatggcaaagaagttaaaaaccttgaaaaaaaattagacgaatgcctaactagaataaccaatgcagagaagtccttaaaagacctgatggagctgaaaaccatggcacgagaactacgtgacgaatgcacaagcctcagtagccgacttgatcaactggaagaaagggtatcagtgatggaagatcaaatgaatgaaatgaagcaagaagagaagttagagaaaaaagaataaaaagaaacaaacaaagcctccaagaaatatgggactatgtgaaaagaccaaatctacgtctgattggtgtatctgaaagtgatggggagaatggaaccaagttggaaaacactctgcaggatattatccaggagaacttccccaacctagcaaggcaggccaacactgaaattcaggaaatacagagaacgccacaaagatactcctcgagaagagcaactccaagacacataattgtcagattcaccaaagttgaaatgaaggaaaaaatgttaagggcagccagagagaaaggtcgggttacccacaaagggaagcccatcagactaacagctgatctctcggcagaaactctacaagccagaagagagtgggggccaatattcaacattcttaaagaaaagaattttcaacccagaatttcatatccagccaaactaagcttcgtaagtgaaggagaaataaaataatttacagacaagcaaatgctgagagatttggtcaccaccaggcctgccctaaaagacctcctgaaggaagcactaaacatggaaaggaacaaccggtaccagccacctcaaaaacatgccaaattgtaaagaccattgaggctaggaagaaactgcatcaactaacgagcaaaataaccagctaacatcataatgacaggatcaaattaacacataaccatattaaccttaaatgtaaatgggctaaatgctccaattaaaagacacagactggcaaactggataaagagtcaagacccatcagtgtgctgtattcaggaaacctatctcacatgtagtgacatacataggctcaaaataaatggatggaggaagatctaccaagcaaatggaaaacaaaaaaagataggtgttgcaatcctagtctctgataaaacagactttaaaccaacaaagatcaaaagagacaagaccattacataatggtaaatggatcaattcaacaaaaagagctaactatcctaaatatatatgcacccaacacaggagtacccagattcataaagcaagtccttagagacctagaaagagacttagactcccacacaataataatgggagactttaacaccccactatcaatattagacagatcaacaagacagaaagttaacaaggatatccaggaattgaactcagctctgcaccaagcagacctaatagacatctacagaactctctaccccaaatcaacagaatatacattcttctcagcaccacaccgcacttattccaaaattgaccacatagttggaagtaaagcactcctcagcaaatgtaaaagaacagaaattataacaaactgtctctcagaccacagtgcaatcaaactagaactcaggattaagaaactcactcaaaaccgctcaactacatggaaactgaacaacctgctcctgagtgactactgggtacataatgaaatgaaggcagaaataaagatgttctttgaaaccaacgagaacaaagacacaacataacagaatctctgtgacacattcaaagcagtgtgtagagggaaatttatagcactaaatgcccacaagagaaagcaggaaaaatctaaaactgacaccctaacatcacaattaaaagaactagagaagcaagagcaaacacattcaaaagctagcagaaggcaagaaataactaagatcagagcagaactgacggaaatagagacacaaaaaaaccttcaaaaaaatcagtgaatccaggagctggttttttgaaaagatcaacaaaattgatagaccgctagcaagactaataaagaagaaaagagagaagaatcaaatagacgcaataaaaaatgataaaggggatatcaccactgatcccatagaaatacaaactaccgtcagagaatactataaacacctctacgcaaataaactagaaaatctagaagaaatggataaattcctggacacatacaccctcccaagactaaaccaggaagaagttgaatctctgaatagactctgaaattgaggcaataattaatagcttaccaaccaaaaaaagtccaagaccagatggattcacagccgaattctacctgaggtgcaaggaggagctggtaccattccttctgaaactattccaagcaatagaaaaagaaggaatcctccctaactcattttatgaggccagcatcatcctgataccaaagcctggcagagacacaacaacaacataaaattttagacccaatatccctgatgaacatcgatgcaaaaatcctcaataaaatattggcaaaccaaatccagcggcacatcaaaaagcttatccaccatgatcaagtggtcttcatccctgggatgcaaggctggttcaacatatgcaaatcaataaacataatccagcatataaacagaaccaacgacaaaaaccatatgattatctcaatagattcagaaaaggcctttgacaaaattcaacaacccttcatgctaaaaactctcaataaatgaggtattgatgggacatatctcaaaataataagagctatcaatgacaaacccacagccaatatcatactgaatgggcaaaaactggaagcattccctttgaaaactggcacaagacagggatgccctctctcaccactcctattcaacataattgttggaagttctggacagggcaatcaggcaggagaaggaaataaagggtattcagttaggaaaagaggaagtcaaattgtccctgtttgcagacgacaagcttgtatatctagaaaagcccattgtctcagcccaaaatctccttaagctgataggcaacttcagcaaagtctcaggatacaaaatcaatgtgcaacaatcacaagcattcttatacaccaataacagacaaacagagcgccaaatcatgagtgaactcccattcacaattgcttcaaagagaataaaatacctaggaatccaacttacaagggacgtgaaggacctcttcaaggagaactacaaaccactgctcaatgaaagaggatacaaacaaatggaagaacattccatgctcatgggtaggaagaatcaatattgtgaaaatggccatactgcccaaggtaatttatagattcagtgccatccccatcaagctaccaatgacattcttcactgaattggaaaaaactacttcaaagttcatatggaaccaaaaaacagccctaagtcaatcctaagcaaaaagaacaaagctggaggcatcacgctacctgacttcaaactatactacgaggctacagtaaccaaaacagcatggtactggtaccaaaacagagatatagatcaatggaacaaaacagagccctcagaaataatgccgcatatctacaaccatctgatctttgacaaacctgacaaaaacaagaaatggggaaaggattccctatttaataaatggtgctgggaaaactggctagccatatgtagaaagctgaaactggatcccttccttacaccttatacaaaaattaattcaagatggattaaagacttaaatgttagacctaaaaccataaaaaccctagaagaaaaactagacaataccattcaggacataggcatgggcaaggacttcatgtctaaaacaccaaaagcaatggcaacaaaagccaaaattgacaaacgggatctaattaaactaaagagcttttgcacagcaaaagaaactaccatcagagtgaacaggcaacctatacagaatgggagaaaatttttccaatctactcatctgacaaagggctaatatccagaatctacaatgaactccaacaaatttacaagaaaaaaacaaacaaccccatcagcaagtgggtgaaggatatgaacagacacttctcaaaagaagacatttatgcagccaaaagacacaggaaaaaatgcccatcatcactggccatcagagaaatgcaaatcaaaacgacaatgagataccatctcacaccagttagaatggcgatcattaaaaagtcaggaaacaacaggtgctggagaggatgtggagaaataggaacacttttacactgttggtgggactgtaaactagttcaaccattgtagaagtcagtgtggcgattcctcagggatctagaactagaaataccatttgacccagccatcccattactgggtatatacccaaaggattataaatcatgctgctataaagacacatgcacacgtatgtttattgcggcactattcacaatagcaaagacttggaaccaacccaaatgtccaacaatgatagactggattaagaaaatgtggcacatgtacaccacggaatactatgcagccataaaaaatgatgagttcatgtcctttgtagggacatggatgaagctggaaaatatcattctcagcaaactatcacaaggacaaaaaaccaaacaccacatgttctcactcataggtgggaattgaacaatgagaacacatggacacaggaaggggaacatcacaccccggggcctgttgtggggtgaggggagcggggagggatagcatttggagatatacctaatgttaaatgatgagttactgggtgcagcacaccaacatggaacatgtatacatacgtaactaacctgcacgttgcgcacatgtaccctagaacttaaagtataataaaaaaaaaaagataaaaaaataaaatgagtgggccagccgggagcggtggctcatgcctgtaatcccagcactttgggaggcccggggcaggcagatcacctgaggtcaggagttcgagaccagcctgaccaacatggagaaaccccgtgtctactaaaaatacaaaattagctgggcatggtggcgcacacctgtaatcccagctactcgggatgctgagacagaagaatcgcttgaacccgggaggtggaggttgcggtgagccgagatcgcgccactgcactccagcctgggcaacaagagtgaaactgtgtctcaaaaaaaaaaaaaaaaaaaagagcaggcctccttttcctttaacaaaataagcctcagatctgtcagagaagagaataatgtaaacagcttctaggggacagaaccatgtggggacatcagaatacagtctgccctgacaagctgctattacatatttatccctttaatgcctatgggcctcaaattataatactattagtaatagttaacacttactaaactcttactgtataccagaggcaattccagacaccatgcaagttttacctccccaaagctccatgagttctacaccttcctcaaattgacaatgctagaaagtgcctagatttgaagtctagctgtggagcgccacacgcttagccagctgggccagtaatgatgtcagcaatggccaatccctgtggggtctgacaattctcaaagtgtatccacacatagggttgaggggatgtagatgaaacaaaattggccatgagttaacaaatgtggaatctggtgacaggtccgtggcagttcactgaatagctctactaggtaggtttaaaatttgtccctacgaaaaaattaaaaataaaattaaacgcctgatatccagaactcaccatatgccggaagtgatttggattgttaactagaagccgtcagagttccccaccagacctaacccttcacagccccaaaccagatgtttggccctaacatgtgagggaaaagcagtccaggaaaggagtcagccagacgggccacccagatgacgaccaaacccaggaactttgccacaaagcacagggggcacctcccacatgacacaccttgagacaacaggtcccagagaaaagacctgcccccattcaaaagagctgcctagatgcctgtcagagtgatacagcccaccactatcagaggacgaaacctccctcacctccctaaaaaccccagggactcctgacccaagacactcgcccaggccctctcaggatattttgaccacgtcaagctcacctccacttccaaccccccaacccctaataaaccaaggtccatcaagcatcaaggcctgagacggcctccccctaaccaccccggtcaccactcgggacatatccagccccacccaaaaaacagaaaaactcggtgatgcaggactcaagacgctccccagccaaaaaccacccagggatgtgcggacctagccacgtccccaccccagccgcggggatgttggtccatttggccctggcagaactcaaccccacagcccaaataaaccccaggacgcacgactggggccgccctccgtattcgaaaactggttgacccagaataatcccgcctggttcaagacaggcattagagttctaggtcactctcgtccccccggggggaaaaaaggtccgcggaggtccgggcaagcaggggctcaccccatcgcctcgccccaatgagcaccgcgagctgcgccctctcctccaaaaaccaaatatctccaacccgcactccccattggccacactctaccccgcgtcctaacctacgctcggcctttcccgaccctcctttccccacgagagagggcatcctggggccaaggagccgcggaggccgcgctcaccagagccagcgtgcccgggatctcggccaccgaccgacgccagaactacaattcccaacatcctcgcaggcttcggctcccattggccgccacagagccacttctgggccgtgcaacggttacttttccaggacagtgaccactgcagtgacagcctctccgtctcttcttaaaatacccatgttgaaaacaggttctggctcccgagtgaagtctctgtccccttggcccattctgcaaaaaaaagactacactccccacaagcctctgcggcagcttccgcaggcgcttccggaagctggggtcaacgagagaagtcatttccgattggcgaatctagcgggagcaatgcgctgtctgtcaggcgtgtgttgggtacagagtttactgcaccggaccacctgaattccctgggctgaggctccatagcacgcgaactaccttgcgtgagcactatgtagattcgacttcgtgttgcctgtgacacacaggcagggcaaagccgcctcccagcgtctcagttgaacccttaccctcaacaccagtgcactcctgtgggtggcctgtagtcacctttcttgtcgaagtcctcaaagttagggacagactctcatccagtttctggagggtggaagcttcactcaggctggagtctggctctctggcctcttatctaagatcccggttcagatctgggctactagagccgggcgtggtggcgcgcgcctgggattcctgtaaccccgagggaggctgaggctgaggctggaggatggcttgagcccaggagttaaatgtatatattttaaaactaataatatttttaaaactgggctacgctggtaccttctgcaacacggcaattaggggtttgcagatcagaccttcagctcataggaggcgcgtttaaatcttaatggcaaatacaaattgaattaaattttacttgttactgaaggggaaataaacctgacctcacgcccttggagtatttccatgagaaatctatgtataagtgctcctttgatatgtacctgatacttttgaaaggctgaataagcacctgccaactttacaaaagaggaatgtttcccccaaaggcctgatgagccatctctttgaaatgtaaacagtgaagaagatagtgcccttatctccctgtcaccttgggagtttagcttaggtgcctagctccaaactcgtaactgcccgcttgtcacagataaaagttttattttttctttttgataaaggcaattaactagtgtagatggctactccaattaccaggtgaatttagaatgaattatgaaaaattgtatagcaaacaatgtcaaatcctcttacaagggggcaaattaccattaattttgaggacatgtttgtaatagattgtatctgcccaactagataaaaagtaagatctctttctgtctggcatctgattagcagattgtctacaatgtgcttcccagtccagttcaatattatttggtaataaaactgttctccttcttttctacgtttgtgaaggggattttctgggttagcaggagattttgtttttattttctccaacacctccttccatcttcttatttcttttcaccttcccaatatcagccttctgaggcttctctgttctccagtactcaggagatagagaacatggccccaaggccgttgtgagccaggagacagacaaacatttcttgatattctgtcctgcctttcacagaaaggaccaattcccttctcttgtcttggaggctgccgtgttagtactgggcagaatctgttactgaaacaccaggggttgggtctaggtcctgctggttgccagtcagaaaaccaatcactgagacgagtattgcaagggaagaaggccttaattgagtgctgcagccaagaagatgggagatcagtctcacatccatctccctgactgaccaaaatcaggggtttgtatagcagggaagaaatgtaactatgtgtgggaaaacagaaattagggagaggtaagttggaacaggaaggaggtgattggttaggcaatatgactgatgaggagtgtgggttctcattgtccacatgcaatgatttggtaagttgcagctccttgatactatctgggaggcctgatgtttggttttcctgagaaaggaactcaggacaaatgtgaccttctcaagttttaagactgggggaatccatttcttttctttccttttcctttctttttttttttttggacagggacttgctctgtcattcaggctagagtgcggtggcatgatcaccgctcatgtagcctcaacctcctgggctcaagtgagtcttccacctcagccccgagtagttgggactacaggcacatgccaccacacctggcaatattttttaattttttgtagagatggggtttcaccatgttgcccaggctgatcttaaactcctaggctcaggtgattctcccacctcagcttcccaaagtgctggaattacaggcatgagccaccgcacctggcctggaaggaccaatttctgtttattcaaagaaaccataaacatcaattctgtgggacaattgggacagtttcaaatccagcccttgatctggagccctccctcagcatccctctgtgctccatgtgactgttattcatcacgtgaataaaatctatggaacagttgaattaaaaatacaaggacagaggtgacatcaatgggaaatctctgtcccttctgtttaattttgctatggacataaaattcatctaaaaatgaagtctattcataaaagagaaaattaggaaaattttgcaatgttttacttgcccctcgccctgctttcctccctggctcttcagcagtctcaaagcctacattcacagcatgggatgcaattatgacagacccacagctaacatcatactcaatggtgaaaactgaaaactcttcccctaaggtcagtgacaagacaaggatgcttacttttgccacttctattcaacattgtactggaaggtctatttatagcaattagacaagaaaaagaaaagccatccaaatgggaaaggaagaagtaaaactatctctattcacagatgatgtgatcttgtatatagtaaacactacatttctataactaacaaacgatttgaaaataagaaaatagttccatttgcaatagcatcaaaaagaataacatatttaggaataactttaaccaggaaggcacaagatttgtacactgaaaattacaaatcattgctgaaagaaattgtgtaagctccaaataaatgaaattacatactccgttcatgggttggaaggcttaatattgttaaaatggcattattcctcaaagcaatctacagatgcaatgctatccttgtcaaaattccaatggcctttttgcagaaatggaaaagttgatcctaaagttcgtatggaattttaagggacccagagtagccaaaacaattttgaaaaagaataaggttggaggactcactcttcttaattttaaaacttaatacaaagcttcagtaattaaaacagtgtggtactgccataagggtagacatagaccaatggataggattgaaagtccagaaatgaaactgtagagaaatggtcaattgcttttcaacaaggatgccgagaccatttaatggggaaagaatagccttttcaataaatcatgctggaacaactggataaccacaagtaaaagaatgaagttggacctctacctcccactgtatacaaaaattaactcaaagactataaagatctaaatataaaagctaaaactcttagaagaaagcataagggttaattttcattaccttgcatctgaaaaattgtttcttagatgtgacaccaaaagcagaagcaacaaatggaaaaataaattgggccagtcgcagtggctcacccctgtaatcccagcactttgggaggccaaggcaggaggatcatttgagctcaggaggtcaagaccagactaggcaacatagaccatttctctaccaaaaaaaaaaaaaaaaaaaatcccctcaaaaatagctgggtgtggtggcaggcatctgtagtcccagctacttgggaggctgagctgggaggatagcttgagcctgggagttccaagctgcagtgagccatgattgtaccactgcactccagcctggatgacagagtgagaccctgtctcaaaaaagaaattggaatttatcaaaatttaaaactttgtgcgccaaaggacactactggaagagtgacaaggcaacccataagaatgagagaaaatatttgcaaatcatatatctgataatggtctaatgtccagaatatattaagatttctatgactcaataacaaaaagactaacaacccaattttaaaatgagcaaaggactcaaataaacattttgaagaaataactgcatacaaaacagccagcaagaacacaccaaaaaaatgcttactgtcactaataattagagaaacacaaactaaaaccataataaaataccacttcacacccactagaatggctatgataaaaatacttttttaatggaaaataacaactgttggcaaagttgtggagaaattagaacccttatactgtacattgctggtaagaatgtaaagtgttctatctgttggggaaatccgtttggtggttccttaataagttaaacatagaattagcatttgacccagcatttctactccaagctatatgccccaaagaattgaaaacaggtgttcaaacaaaaacttttatagaatgtttacatcagcactattcagaatagctgaaaggtggaaacaatccgaatgttcatcagttggtgaacagataagcaaaatatgataaatccatacaatcaaatagtattcagccataaaagtattgatatatggtataacatggatgaaccttgaaaacattatgctaagtgaaagaaaccagacacaaaagaccatacactgtatcattccacttaaatgaatttatatgtccggaataggcagatccatggagacagaaagtagattagtagcagggtctagtggaaaggtgaaatgcaaaatgaccacttaatgggcacaggattcccttttggggcgatgaaaatattctggaattgccataacgggatgtcttaattggagaatcacataaaaggaaaaagaagttttaaaatgagaaaataaatagaaaaagaacaacaaaaaatgaaaacgttctggaattagataatggtgatggttgggcaatattgtgaatgtactgaatgactctgtgtaacttaaaatggttaaaatgcttaaatgtgaaatttcttctattagaatgaattgagataaatatcacctttatatgagctaaaagccaaagaacacacatttgcctcaactgcacttttcttctgtaagtaagaccaaattaaatgtagctagggagcatttatgaaaatgagcttgaatcgcctgtgttctcaaaagaatcttcaaaaggattcaaaagtacttaagatgctcaaaacttcaaagatcttagaatttctcttattgggagttataagcaattatagtgaatcaaagcagtatttgtgtaaatgagcccatagccatacatgttctcaaagaaccttctcgttgctagtcaaatcaaagtaagatgaatccagtcagtatttgtaaaaataagcagtctaatttaaagctcaatattatatatatcttttaaaaaatttttgtaagactaatactgtgtgtttaatgaattagaagccaaagcaggccaggcatggtggctcacgtctgtagttccagcactttgggaggccaaggcaggcagatcacttgaagccaggagttgaagaccagcctggctaatatggcgaaaccccatctctactaagaatattaatacaaaaatttagccaaatttggtggcatgcacccatagtcccagctactcaagaggctgaggcacgagaattgcttgaactcaggaggcggaggttgcagtgagccaagtgagctgagattgcaccactgcactgcactccagcctgggtgacagagcgagacattgtatcaaaaaaaaaaaagaagaagaagaagaaagaagaaggaaggaaggagaagaaggaaggaaggagaaggaagaagaagaaagagaagaagaagccaaatcagaaaaagaaaggaaaaaaagactaatactgcagtgttagtaaacacaagttcagacattttactagatttactgctgattagaatacattgatattaatgtaaactttaaacaaaccaggtgataaagacaccttcgtcttattatttgtcagagctatttatgatatttgtgaaaatgagttctgaatcccatattggtttttttcttttttagcctcaatatattaccacattaagaatcccatattgttcttaataaatttacaaatgtagtcagaagcattcaaaatatgtattgttatatggaggaattacaatgactcagcaggatttgtgaaatcagctcagaattgttctccaaagaatcttaaaaaatattccaaaaaatattccaaaagcattcaaaagtactccaactctaacttcttttttgaactactactgctaaatagataactagtgataacttgagacacatgtatgtcctggagcttctcttttacatactgtagttattctaattatgtctagttacctagttagtatgggttatcttgttatctctacttgtcagtagttcttactagttatatgaacaagaaataagctgtagttaacagaaatgtatggttgagggtctttgcttaacccttacccttgactttgatcttgggcatgaacttcaaccttagacttcgaggttcaacatgagagtgagagacaggctcaggtgatggtaccagagtgagcgtcacacagtcagggcgatgatccgtatctgcatcatcaggaggattggagtaaggatgagtgtcagggtcagcggctgtgaaaggaggaggggagtcagactcagagtgagattgagggtcaaggtcagagtcagaaaggggtgaatgtgagggtgaatgtcagggccagattgaaagtgagagtgatggtcagattgaggtgatgaagtgagaatgggggctagggtgagggtgaggttgagaattagggtgatgatcaaggttggggtttgggagagagcaggctgagtgtttggttcaggtcggaatcaaggtgaggatgagagtcggggtcacagagatgttaaggatgtgatttagaagccaaatgtcctggtgcatgcctgtaatcccaactactcaggaggctgaggattgcttgagtccaacaattagaggccagcctgggcaatggagcgagaccctgtcttcaaaaagggaggggattgtgatttagggtaaaggtggggccagagtgatgctgtgagggtcagagtcactgttaatgtcaggctgagggtgagggttagtgtttgatttaggatcagagtaggtcccagtgaggattaaagtcagagtgagagcaagtgcacagtgagtgtgagcgtgggcatgagagtgagatcaaggtcagtgtcaaagtaagagtccatctgaggaataaactcagagtgaggatgagtgagcagggtagggtcaggacaacagtgatgatgagggtctggtttagcgtcaagggcaagtgtcaagatgaaactgagggtcagggtgaaggtgagagtgagggagagtgaggtctagctgaggatgaaagggagattgagaaagagagagtcaagtgcaattcaggtccagtgtatgaggcttaggtcaggtttaaggcaagggttgggataagggttatgatcacattgagggtcaggttgaggataaaggtcaggctcaaggccagaaagtgttagggtaaaggtgggcgtgaggttcagggtcaaggagaagatgagagtgagttgacattgaggatgtccttcatgattagtgtcactgtcacggtcattactttttgtgacttacaacaaatctggatgaacctagtcaatttaagtcagaatcatacattcatatctaaggtaactcactatggtgaattcaatcagatgtatatgaaagtaagcagaatacttgaaaacagcaaaccatgcttccaactaaggttcaagtccaggtttgggaatatttcaaatgatatgtttcattgtgcattagagcatatttaaatgaaaccaagctgtttatgtcaaacgagctcagaatctatcattcttcctgaatgagactgagtgctccagagaaatagaagcaacagaatttgtatgtgtttatgtatttgtatatgtatatgtatacacacacacaggtatatatacaaatatacacacacatatatacacattcagccaatgtatatgtgtgtatatatatatacacacatatatagctgatgtatatgtatatatatacacacatatacatataccaggagagccgatggtgcagttccagtccaaaggggcagcctgctgaagaattccctctggtcttttttttttttcttttttgagatagggtcttactctgcactctgtcacccaggctagagtgcagtggcatcatcatggctcactgcagcctcgacctcctgggctcaagcagtcctcccacctcagccttccaagtaactgggactacaggcacacaccaccatgcctggctagttattaattttttttttttgtagagatggggtccccctctgtcacccaggctggtcttgaactcctggcctcaagtgatcctctcacctcagcctcccaaagtgctgggattaaaggagtgagccgttgcccttggcctcaatttgttattgcttattagaataaattgacatgaaagtaagctttaataataataataataaaagatgagaaacacaccgtcatcaaaactgtacttagagctaagacaaatggaaacattatatgtgaaagacatctcaaaatcacatattgtccttaataaaattttaaaagtactcaaaggtttatttttttttccttttttctctctttttttttttcgagacagagtctcactctgttacccaggctggagtgcagtggctcgatctcggctcactgtaacctctgcctcccaggctcaagtgattccccttcctcagctttctgagtagctgggattacaggcgcgtgccaccacgtctggctacctttttgtatttttttagtagagacgtagtttcgccatgttgaccaggcttgtcttgaactcctgaactcagacagtttgccgaccttggcctcccagagtgttagaattacaggcgtgagccaccgcgcccagcctcaaagatttatttctatttgggagaattataatgaatcaaaagcagtattcgtgtaaatgagctcattgtcacattgctcttaaaagatccttcttattgccagttagagcaaattaagtagaatctagaattctgaagccaacatagaatcactaactgttgtcaaataatcttttgtactccaaagtactccaaaatacacaatagtactcacaagtgccagactctaacttctgatttctaaatagctacccctccggttccacactcactcacaacctacaaccctcccttacagacactaccttccaacataccacatgctctcagccccgtgtccacttccctacaccacttgcttcacatccactcaatacctatgctctgacaatcacccacacaccacctacctctcccctgtaaaccattcagtgcctacccttgcagcccacacccactgataatggtttggctctgtgttcctacccaaatctcatctcgaattgtaatccccacatgtcaggggagggacctggtggaaggcgattggctcatgggggtggtttcatccatgctgtcctcatgatagtgagttctcacaagatctgatggtttaaaagtgtttggcagttccctgcccccctctctctttcctgccatcgtgtaagacatgccttgcttccccttcaccttccaccatgattgtaagtttcctgaggcctacccagccatgtgcaactgtgagtcaattaaacctctttcctttttaaattacccagtcttgggtagttctttatagtagtgtgaaaatggactaatccacccattcactactttctgacccatactcattctctacttactccctcaaataccccgtgacctaccccacattacataccaactcactacccacaccctgccacagactcctttactacgctctcataatgattctgacactgacaccctaatcctgactgtgacactgactctccctctgaccctgtacctccagctcactctcacactcactctggtcctaaccatgaacctgaccttcacactcacactgactctggacttcgccttcagatttgcctcacctcactgaatagaacaaaaagaccagcctccttgaacaagaggaaattcttcagcagactgcctttagactggaactgcaccattggctcccctggggctccagcctgccagcctccataattgtgtgaagcaattccttatactaaatctccatatgtgtgtgtgcatgtgtgtgtatacgcatatacatacacattctattggttctgtttctctggagaaccctgactcattcaggaaaaatgatagattctgaactcatttgacataaacagcttggtttcatctaaatatgctctaacacacaatggacatttcatttgagatgttcctgaacctggacctgaaccttagttgaaagtgtgatttcctgcctgttttcaactgttctgtttagtttcacatatatttaattgaattcaccatagggagatgactctgatttaaattgcctaggttcatcctaatttgttgtaagtcacaaaaaaataaggaaatttagagaacaaggtgtgattgtaagattattttctctaatactgcttagattcatgtaatttggctctaagttatttttatctgctctatctgaccatttcacacttattaagaggggagagtctgtttcttagcttgtttactgcttggttgtacatagtttaatctatatttctactaattcaacataatagagtactttggaggataatgactgcttctgagctaagtttcactaatactgcttagattcaccttaatttaatgcactttaagattctatgtttgtattctacatgcactttatgagctagtttgtatatactatgaagtttatatatcatttattaaatgtataaatttcatttataatggatgagtgattttgaacttgacttcctttatatcacctaatttatgtgctactagccaggcgtggtacctcacatctataatcccagcactttaggaggccaaggtgggaggatctcttgagcccagaggttagagatcagcctggacaacatggcaagaccccgtctctattaaaaagaaataattttttaaattaaaatatgtgctacctatgcctagctacattttaattattcctaagagcctacaatcgcttttcagaacaatgtctgattctgagcttgttcattaatatactgcttattttattttattttattttactagatatgctctaactcatcttaaagaggagaatcagtgggaaatgggtctgggaagatcattggtcagctctggtcccagaaacttgggcaggcaccccctgtaaagcacttgtgaacatggggactcgtcttctacgccgaaaagtggtgactcacaccataggcaagtggcagatattcagcctctggaagagaatattggggacagttgctggcagcacaggttggcacttggactctgaaacaaaaaatggggacttcacttctggagggagaggtggggacacagccccagggcaaggggaggggacttagcttcttgggggagatgcagggaggaagcttctggagtgggaagtctttaatgagtggcatggatttagtctgtagaactgaaaccaaaactcatcttttagaagggataagtgtagacttagcctttgggacaagtggtgaggacatagcatctggaaggagaagcaagaatgtagcctctgctgagggaaatgaacgtgtaatctctggggcaaaagataggtacttaacctctggcgttgaaatccagacccagcctctggaagaagagtggacttaccccctgggcagatggtggaaaccttgcttatggtacaagcattgggaacttagccactggagtcataatcagggcaggcatagactctggggcagaaagtggaaacttcacctctggggtgaacagtgggggcttcttctctggagtcagatggggactcagcattgggaagaatacggtggactttttatattctggagacagaagtagcctttagggagagaggtagagatagcctgtggagcccaaatccagatgtagcctctggagggagaagtagggccctcacctgatgggagacctctggggactcagcttccagctctagaagcagagacctagactcaggtgtgggtagtgggatgtagtctctgaggcaagagatgacttctgcagtcagaattggggctcagcctccggagagggaagtgtggacctagccagtgggtatatggtggaaacttagcctttggatggagaagtaggatcttagtctctagcttctgtgtggggagtggggatttagcttctgaaatggaagatggggtcttagcctctgaagctgaaaatctggactcagcttctggagggaaaagctgggacatagacgtgggtggtcgcggtcaaaatcaatttctcaaaagcggcctttatgccaggccggaggggctccccctagcgagtgagggaagcaggacactttgaaacgaatgcgtttctcagcttctttgcacatgtaaagttacaaagcacttaagaagcatgtaaggtttgtttaaaatgaataagttattttgagcttgatttaacataaactcttagatatactctaagttactctaagaaggtccttttgagaatgcttgagtctacacttgttttaatatcaactgttacatatgaattatctctaaggagcaataaaagtgtggtgtaaaatgaatgagtaattttgagcttgatttcacctaaaatgcttagtactgactacatggagtctaattccacataacaagttaggttaaggacatattccttaatactgcttagatttatctaaattggttctaactcattttatttagtttctcaccattagaagtttccttagaggggaatgtctgattcttagcttgtttgcaaacactctacttgtttgtaaacatacatttttatttcaacataataaggtactttggagttaccttagacgtgacgcaacctgtttttatttaacctacttcatttgctcaaacttacaaaaagattacttagttggagataagtctttctgagccagtttgttcgtctgtctttctgagctaacgtactgtgtagttcacaataagtcaatctggctcagtttcaattttaacataagctgcttaattacatttatatttactccgactcataataagaagttacttttaagatcaaagtgtgaggtcaggcatggtggctcacgcctgtaatcccaatactttgggaggccaaggcaggtggatagcttgagctcaggagctcgagaccagcctgggcaacatggcaaaaccctgtctctacaaaagacacaaaaaaattagccaggtgtagtagcttgtgcctgtagacccagctacttgggaggctgaggtgggaggatcgcttgagcctgggaggcagaggttgtggcagcggcatttgatccagagcaactccatcttgaataggggctgggtaaaataaggctgagatctactaggctgcattcccaggaggttaggcattttaagtcataggatgagattggaggtcagcacaagatacaggtcacaaagaccttgctgataaaacaggatgtggtaaagaagctggccaaaaccaaaatggtgatgaaaatgaactctggttgtcctcactgctcatgatacactaattataattcattagcatgctaaaagatgctcccaccagcaccatgacagtttacagatgccatggcaatgtcaggaagttaccctatatggtctaaaaaggggaggaaccctcggttccgagaattgcccaccccttttccagaaaactcatcaataatccacaccttgtttagcatacaatcaagaaataactataagtatagtcagtccggcagcccatgccactgctatgcctatggagtggccactcttttattccttttttttttaaataaacttaccttcactttatggactcgcagggaattctttcctttttttttcttttttttacattcagaatttttattttaaaacaaagaatcagagtaacatttataatagaaaatccatatggaaatattcacaatcttctcagtgagaaatgggaaaacaacttccctgccttactgccatcctactgtttgaggagccagaagttgacttgaagttgcaaggtcaccttttccagctaaaccccactccatagctatgtgtactttttttttttttttttttttgagacggaatctcgcactctggcctgggctaggatgcaatggtgcgatcttggctcactgcaacctctgcgtcctggattcacgtgattctcctgcctcagcctccccagtagctgggattacaggggcccaccaccacgcctggctaagaattctttctttcttacacacgatccaagaatcctctcttggagtctggatgggacacctttctggtaacagttgcagtgagctgagatcgtgccactgcactccagcctgggtgacagagaccccgtctcaaaaaaaaaaaaaaaaaaatcgaagtgtgattctgagcctctttgaaaatactgcttaggatagctggtgtggcccactcccataatcccatcactttgggaggcctaggcaggaggatcccttgagcccaggagttcaagaccagactgggcaacatagtaagaccctgtctctctacaaaataaaattagctgggcatggtagcacacacctgtgctcctagctacttgggaggcttaggatctgcttgagctggggaggtcgaggctgcagtgaggcatgatcataccactgcactccagcctgggggacaaagggagaccctgcctcagagagagacagataaattatactgcttaaattcatctcaagtcgctctaactcacaacaaatgcttaccctggcagagaacgtgtgattttgaggttgctttcacacatacctgctagtgtccactaggtctccacttcttaccgtgaggctgggtttcgcgttctggttccaggctgtccccccactgcctgcccctgccccgaatcgcaggttttgccgcaatggcaagtcccaacttggccaacagggggcgcccgcccgaaccgccaggaccgagactcgcgagcttccgggcccagttcctcagattcagcgcgggggagagctgcgggccccgccgggggagcccagggggccttcgcagaggatctggaggcctttcagaaaggaagccaggtgcagggacgacccgaagcccggaccccagccccggcgctgcaacaggcccgccctccctgccttggcccttccctcttactatttttattttgagcgagagtctcgctgtgtcacccaggctggtctcgaactccccctcccaaagtgctgggatcacaggcgtgagccaccgcgcccgctggctcccgatcttccgcggggcccagacgccaaggtcccggctctccattcgaaagcggagtccccctctccggagtcgaatggaatccccgcttcccggcttcccgctcctgaggcttagtccccgcctctccccgaggggctcagccccgctgtttcctccagaggcggatcccgcagttttccccccagaaaaggaattcagcattttttatcctaggtctaacccggccttccgctccaagactaagtgatggtctacgccgccggcggccgaatccccacccgccctaccagaggctaagcccccacctcgcgcttaagggaacgagtcccgatctgtcgccgtagtgccgccccaggctgccggccgccgagtccccgttccctccgcacccgccaccccgcgtaggctgactccccgcttgccgccccaaaccgaagtcccaatttttagcttcagtggcctcagagacctgacttttccaagcttccataggaaggtgaggatggagagcatctggcatccggagcccctgtccctcggcacagccccgaggcctccggggggtcgggggaaagggttcggggaccgcaggggcgatgaagccccaaaccctgagccattctccgtgcttctggccttagagggacttgcgcacacatggctgagaatattaaccagaaaggtgttactgataccagaaaggggtcccgatccagaccccaagagagagttcttggaccttgggcaaaaattccaggcgattccatagagtaaagtgaaagcaagtttattaagaaagcaaaggaataaagaagggctactccataggcagagcaccagcgtgggctgctcaactgattgtagttacttcctgactatatgccaaacaaggggtggattattcaggagttttccaggaaaggggtgggcagttcctggaactgaaggttcttccccctcttttagaccatatagggtaacttctggacattaccatggcatttgtaaactgtcatggtgcaaaaaaaaaaaaaaaaaaaaaaaaaaaaaaagacacttttatcatgctaaaatattataattagcatataatgagcagtgaggacgatcagaggtcactttcctggccatcttggttgtggtggttttgggcaggcttctttatggcatgctgttttatcagcaaggtgtttggtctttttgtttgttcattcttttttttttttttcttttttttttttttttgagacggagctgtcacccaggctggagtgcagtggcatgatcttggctcactgcaacctccgcctctcgggttcaagcgattctcatgcctcagcctcccaagtaggtgggactataggcgcgtacctccacacctggttaatttttgatttttagtagagacagggtttcaccatgttggccagactggtctcgaactcctgacctcaggtgatccacccacttcggcctcccaaagtgctgacattacaggtgtgagccaccactctgggctagtaccttgtgcctacctcctgtctcatcctgtgatttagaatgcctaacctcctggaaataaaacccagtaggtttcagccttattttacccagcccctattcaaccagttgctctggttcaaatgcctctgacattaccaaaaaggaaaatgtaagctgtaatcacagtcagcaccaaattcaaaaaacttaatgaaacagtcacctgtgaaaaccagagacagatgtgtgaatatactaaaaaacacagaattgttcactttaaaagggtaaattttgtagtatggtcattatacctccatgaagctgttcttaaacaaaaaagactagttagacctcaggttttcccacttcagcagattcaaagttggctctttaagatgctggcatggtggaaagcactgggctgaggggtcttagacacagccaagggcaagatgagaacccatatgaaaacaagagaaccgggtgaaaattcgcctcctgatgagcggcactccgagccaccttctcttcctcagctcccacactggcagccaaggtgtgttctctgggaaaatgggaagatttttctctgggaattctgccctgcccagaagaaaaggcccataaacactgggagtgggaatctcttatccctgcctcatcaccctacagcagtgggtctcaaacttgagggacaccccccacccctgccgcaccttctcctggtacatttaacagtgcctggagatgctgtgggttatctcacctggcagcaagtgggtgttacaggtatctatcacacagaggccaaggatgctgctgaacatcttacaactcaaaagacagctctcacacaacgaagaaataactggtccaaaatatcactaatgctgagattgagaaacactgtcctgaagtgaggcccacccatcagcaaggcctgcccacatgcagaatgcttccacatagcttttcagcatctcacaatgaaatatgagcagatacccaagtgcccccaaacaataagacaaagattagaagagtgatgacttaaaagagtttgcccaagtgacagggagaccaatgttgtccctgacacatgcatctcaaagttgaagtctccctgcatccattcccactccctttgccaaggtcaaagctcactgagcagtggtccaaccacaggactgctggttcccaagcaatcttaaaaaagggggactcgccggctcagtggaggtcttctccactccaaactgtatgcatgaatacgctgacattctaggatatcagatgagctgaatcttgctagggggagtgagctctagaaacaaatagtatgtagaattcaaaacgtccaaggagaggggttcaggaggtatttcctatggcaaaagtggctgagaaacttaaagcaattaagttgtctctgctggggactttgctctcctgggctctgctaccacaacaccaggttatctccaaagggttggtgatgagcgatcgcacatcatagcctggcttagtgctgctctgtggaatagaaaggaagccctagagcccagtacaatagagagaatacagaagaggctggagatggggcagctgacaaggcgagggccacatctctaccaccatgtggccataccttcgtgaggcagtgaagtaaggaactttgcagcaggtgcattatggagcagaagaaaggggcaggctcattcgtgcctggcaaaagtggggcccagacgcactgcaggcctaggcactgaggctgggagtaaagtgatatgagcaggaatcccacagagcgctctcctaactcttcagggctttggggtgttctggttatggtcatattatctcactcagtccccaaagggctcttgcaggagttgtagcagaattacctccacccagcagatgaaaaaacggaggcagagaaagcttcaataacttgcttatggtagtgtggggtgaagaggggcttgtcacccatctgatttcagctgacacctaaaaatggggtgtccgatttcagccgacatctgaaaatgggggttgactttgtttaacacttttgctttgaggagcattccagttgtccttatcccgtatgggcagaaggaacagagcccctgaatctaggctccctactttctttccctgactctgcctcctggggtggtgggggagaagcagacgaataaaaaaactatgacccatagtcaccagctggctgcagttctccttgtgggttgtgtagaccgtgcctcttagtctgtctggcttatatctggcagtaatcctcccctgcctttggagtaatggggggccctcaggtcccagatacctggatgggtccaacttcctgcctaagagtctgagatggcagagacaacctcagcagtttctcgaaaacaggacccttctgccccaccttcagtgctgatcaagaaaggtcaaggaaccaagactctgaccaaacaaacttagaagcactgttcatattacacaacccaaagctttcagggacacaccgctaccgtccagaatcctatggcctctctcccaccctgtgccacaaactaccccagcactgagctcattggtgtgggttcgtcggtggagggcagcatccttgagatagcgccagctcacgttatccagctagggtgttagctggcgtaactggatcctctccattgtgccggtttacaacattctgtgagcaacactggatgttttgtaagcagatacccacagctaattatatatatatatgtatatacttctaattggagagataaattaacaagatggcccaagaagcttccccaaataagggctttggggacaaaagcacccctggatttgaacgccctgtgacttttggtggagactgcacatgttatttttgttgttgtcgtattgggtcctggggtttcattttctctgagcaagccacatccatgaaagagaattagcacagagttcaccctcctcagctccagcaatagggacattcactatcctgataacattagggcacaacactctgatattattaattttcagaataatgtttgagttgcatgtccaataaatgttactcaaatagtattagctaaagtattgtgttaagaagaataaagaaaaagaaaaggaatatttcacaaaaagttaaaaacacatttttgtgtcactttttttttttcttaaaagttgcaaatgtgtgaaatcaagaggtttccagttacggacatgtcaagaccaccatgaagaaaaggcaaatcttgatgaggcaaaaaccaagggcagagcagagagggagtcttcccagaggctggagtgctctgctcagacaccacaccccacctggcagtttgctagggttatcgctctgctaggaaacatcattccaagtcatattgtaaaatgctgggtgggcagtgtgcccaggggtctgccacatgtcctgaagtcagcagtcttcatagttgtgcctcaggcaggggggatagtgggagcaaagacaaagagaagttctagtacctcgaatgagagcaagtcacatcagtgggtaggaatagctgcactgaaagagagaggcagagggggctggagggtgttggagctctccggggccttggatggcacattagagagtctgggttttacccctaggccatggagtcccagcgaagggttttaagtagaggggagatgaagtcagacctctgctctgggggctgccttagctgccatgcaagagagaaactgaagggcagggccagcagcccggtgcccaggtaggaggcaaacacggggacctttggaaaggaggatatggtgtggtccaggtttttcccaagaggtcagaagagtgtagggaataaaagcctgggctctggagtaagaacagtcaacagggctgaatcctgtctccagggactgctgggacacatcacatctaagcctccattttttcatctgtaaagaaagataagacaatctgcctcaaatggctgttgtgatgattcaataagtcatttaaaggggttggcaagttcctggcagaaaggcagtgacaggtaactctcagctgtggctgtcttgaagggtgggcttcctgagtgtgcagcctgcgcgtggctgctcatggctccacactcagaagcgccctgcacttggtctaatactgtgctgaaaaagtgaaagtgaaattctttttttttttttgagacggagtttcgctctgtcgcccaggctggagtgcaatggcgtgatcttggcttactgcaacctccatctcccgggttcaagggattctcctgcctcagcctcccgagtagctaggattacaggcacatccacccggctaatttttgtatttttagtagagatggggtttcaccatcttggccaggctggtctcgaactcttgacctttagtgatccacctgcctcggcctcccaaagtgctgggatgagaggcgtgagccaccgcgtccagcctatagtgaaattcttaagaattttatcttttgggctggacatggtggttcacgcctgtcatcccaacactttgggaggctgaggcaggagtactgcataagctaaagagttcacgatcagcctgggcaacacggtgagacccatctctaaaaaaaaaaagttaattgggccaggtgtggtggctcacgcctgtaatcacatcactttgggaagccgacgtgggcagatcattagaggccaggagttcgagactagcctggccaacatggtgaaaccccatctctactaaaaatacaaaaattagccaggcatggtggcacacgcctgtaatcccagctacctgggaggctgaggcaagagaattgcttgaacccgggaggcagaagttgcagtgagccgagatcatgccactgaattccagcctgggtgacagagtgagactctatctcaaaaataaaaaataattttaaaaaattaaaaattaaggctgggcttagtggctcacacctgtaatcctatcactttgggaggccaaggtggatggatcacttgaggtcaggagtttgagaccagcctgatcaacatggtgaaaccccatctctattaaaaatacaaaattagccaggcatggtggcacactcctgtaatcctagctacttaggaggctgaggcaagagaatcacttgaacctgggaggcagaggttgcagtgagccaggatcacgccactgcactccagtctgggtgacagagcaaaactctgtttcaaaaacaacaacaaaaaaaaaaaattagctgggcatagtggtgcttttttccggccccagctacttgggaggctgaagcaggaggatgatttgagtccaggatgttgaggctgctgtgaaccatgttcatgccattgcattatagcctgagcctgtgaagaagaagaaggaagaaggaagaaggagaaggaggaggaggagagaaggagaaggaggagggggggaagtctgatgggacaatggggtgcgtacatgagcagaggagataggaacatatgccgccctatttgcgtatcccatatatgatgccccatgagcacataattccagtgggcccacgacgcatgggagtttagcaagactcaaagccagtacaaggcaggggtgtaatatctgtggttaaatatgtaggaatgcttccagcccagaggggctacacttcccatttaatccagaacttgcttcaaacactaaaagaaggcagtggtgttctaagaagcatgacaactaagggaccctatcctattctttttcattcaagttacttccctggattagccaaccacgtaggctgacaataatgacccagaagaaaaggaaaagatagagaaacccataattccttttttttcccagttctttttcactcatcagtaagccaaaggcaggaaacattggtagaatatgcacataccaagacgtgaagtaaaaccattgagttggctttgtgcagcatttctacagtcctgataagcctgaaatcctgcacatatacaagctacaaaatacaaattgtgtcatttcagtgattccacataggagttaagtactcttatacttgcactgaaacctgttattgctcgatatacagatgaacagtgggatccatgcaaataatttaaaattttgagttttctcagaatgacgttaaatagtagaaagagaaaggctttgtattttagtatctttaactgttcatttttcttgctttttggacaagggaccccacattttcattttccactgggccctgcaaattatgtaggccgctctgctgcttttaatattaaccctcgggcggggggtgagtgaagactggggaaaaggcagtcgaatcctaatagtcattggaggctagaaggacagacatgttatagaatccttgcatttggttcagagatacaccttggattctatgtccaagcagatgggccagcctaggggtgctcaggcctgtcccactctcctcttggaccttgtctcccccttggtctaagtgagcatcagcatccctgctcccacctccccatgcccttcatccctaccagcctagctccctcagttccctccccagcctatgcaggaggacgagcagctgcctttctagaaaaggcaacattaggcctggttccctaacagcagagcctgagacggggcaggcgggggtggagggtgctctcaggagaagaggcaagaagcaggacagggcaggagaaggggatgagcagagaccccactggagtccagcttctggctcatctcacaggaagctctgggatgtgaatgacatcaataagttgttcccatttttgacagaggccgggctgtcatacctctttgttcatccatctgtggctgtaggctaatccggggatggtgatgggattacctcagggttcagcagcccctgctcggccaaaggcaattctcctccgttgaaggggtccgctatgtgccttagccctggaggatgggtgcacttgctctgagagggaatctgggcagatcactggcagtgtccactacggaatctaaccctgaacaacaaggaaaccacagcccagaagtgaccttcacaagaaggcacttggggatttaatggtcagcccaagtcaaagccacatatcccagcttccagacccagactcaattgatctcttgtcacagacctgcccaggagacacaagggctccgcgttttttcattttcttcatctgacacatgggagtgacaacactgtctcaccgggctgttgtgagaaatagagaggttggggcaagagtgccccaggcaggacctagcacagagcagtgtgcaacacacatgccacgaggataatagttttaagacatcactgtcgttttctttctcacactctctgatgtgagacctgctccctcttgcctgaatgtgtattcatctcaggaagcattggaattgatctaggtggcgtgcaaagaaaaaagcaaaatactctgtgttcagtatctgacttccaaacttggatttttgaattccttagaaataattgtggaaagcagggtttgttgtgagagagaagaaatctgccaattcctagatcactccttcagacaccaagggctaaacccagccaccagacagcaaaaacacatcagcccctgaggacaagggtctctgtttcatttgctgatgaatccccagagccgagaactgactctgaccccagtgggtgctcatttttatctgtgaggagaaaagtggagttatcgactgtgtggacagtcaggtacaagggaatttgatagtcctatctggagggaatttctctccggagatgaaggtgttgtagaaagcctttctcctctggcaacagagaacaacaagagcagggtaaaggcaggaggcggagcttgcagtgagccgagatcgcgccactgcactccagcctgggcgacagagccagacgctgtctcaaaaaaaaaaaaaaaaaaaaaaaagagcagggtaaagggctgctgggggtcctcactcatcaggggagagcgcttggggcacccccagcagaaaccttactcaccagtcctctgggccacgctgtcctgtggctgcacagctgcccgtgctgcttctcacatggaccggggtcctgcactggcatggccctggtggggagagggatttgcggctgcagtcctgcagtatggatgccagagaatgcaactgagatcctcccactgccctcatgccccggggactggggcggccctgcaggaaccagttgggtcggagatcaaggtgtgggacaaagagaaaagcttcaaagcttgagatgaaccgttgcacgtgcattttagaggtagctcctttgccccttccctcgccaagcttgcatgaggacaggcactcctactcctgacccctgagaaagtacatgggcatgatcagaggctaggtctgtccttgacacccacaggagacttgccctggggaaggctttttattctgttgtgtcatagaatcctttggcatcctggtaaggtccgtagacccctttttatatttttttttatttttgagacagagtctcactctatcacccagggagtgcagtggtgcaatctcagctcactgcaacctccacctcctgggtcaagcaattctgcctcagcctcctgagtagctgggactacagacacatcccaccacgcccggctaatttttgcatttttagtagagatggggtttcaccatgttggccagactggtccggaactcccaaccctaggtgatccgtctgccttggcctcccaaaattctgggattacaggcgtgaaccaccacgcccagccacagaccgcttttcagaacatagacattaaatccataaaataaaacactaggattacaaaggagaccaatgatcctgaaataggcatcaaaatcactttaaatatctttcatataatgacaatatatgcttcctaattaaataacaagatttcatggcaggtctctaactatcataattttgaagttgtgataacatgtaagatattttgagacatccccagtggtttaattgggaaaaaaaataactgtgacttttgctgagacaaaaatcacatctttgcttacattcatgattgagggaaatgctaaatcgcagttaaggctaggaaaagtgaaagtgtagtattttctccatcactattcacaaacccacagaattccatccacagctctgggggttccagggactccagattaagaactccacactctgagaccttatgactgccttccagagggtccctctgacactttagtgatggttttcaaagcagccaaatctgtgcctccctgaagccagggaggaaaagctgctgagggagggggcgggggctgagcgggaacattcatctgtgtgggctcaggacgcctgcagcaggatccacagtgcaggctcccagggcctggcacagactgactgattccaacgcccagtgccactcctgggagtatgcattttatttttaaaaatttattattattatttttctttttgtggagatggggtctcactacgttgcacaggctggtcttgagctcttgggctcaagcaatcctcctgcctctgccttcctaagtgctgagattacaggtgtgaaccaccacatgccagaatctgcattttaaacagaagcccaagtaataacttaaacaaacattctagaatttccctggtgctttgtcccaatcagggactcaagatagtgggagagggcctgggatgctcctcacacctcctctggctagagtgccagcggcatcattgccaggagataagcctgcagctcctggcccctccagggcccctcatgtataactgatgcctgaaacatgaggccatgctgcctctttgcagggaaacctgagaagaggagtgtgtggccggattgatgggccgggaactcgtcgccttccttcacccgtctctctcccccaaacttcacccacctccacattcaatctcaaaccaagaagccccgcctgctgtcaggtctaggaagggaggccagccaccatgagggcaggaaagcagcccaggctgaaggcgtgcatacaggagcacgctgcgtgagcctgtgcaggaccccagcagtgctgctgaccatgagccaccaggtaaagggcctgaaagaggaaggtgagtccacgtcctgatcctgcggggcccgcccacagggttcctgggcagcagcaggggatgggggaagcacatatggtgttcagaggcatagggaggagctgggtttgagtccagggcctgtcccctgtgcgctgagcgacctcggctggttattcaacctctctgatcctcacgcatgagatgggggtagtcatcacctccttgcagggctactggaaggattcaagacaacctgtgcacagcacctgtgttcaggccagcactggagactgtcacggccgatgcatgctcctcagagcctgctggggcgtctcagccacctattgtctcggttagggttgcctgttccgagcaagcccctcagcagatttctatctgtctctgtctctgtgcagggcagggggtgggggatgttctgacctcatgactgacagtatcagacaaatgtgacaggcaggggactctataatttgctgagtaaaatcattggagctgggtcccagtttgaggcagccacaaatcagctgaggggtcccacagtgaccgggggtctgcagggagggggactcaccagaggccagccatttgtcagcaatcctgtctcttacagcacgaggcggagtgaaagggcgggtgaagagcggctctccacacacaggtgagatggggtggtggggtctctggggagcctgcagtgcctgggtgccctctgcttagcccaacagtccagccacccatccaacattctccttcatctccttccctctcattcaacaccctgcatggagccttcctgggaggcaaggtgtttaacatgggagggggcagagtaccactcagagaaggtgctgctcagccctcggtgtcaggggagactcccagggttagtgacactctgagctgagccttgggaagcagtgaacattcaccagacagagggcagggaagctcggtgcaggcttctggcgggtggtgtggccagattcacatccaggcccccggactctaggaggaacactcttaacctccaaaaagtagtaggcataatgggtgctccatcaccttcccactgggaatgtgaccacagctctcccgtgagccggtgagggagccaacttgctccaggagaagtgggagagcccaaggaagccataggcgggagagaaaacccttggttgagactgagggttcaggggagaggggcagaagccacactcacaggctgggcatcttcatgtcacaaaatattatggatgcgatgctgttttctcccccttcacgtcccaggcagggctgggtcctgcgccccacactagtaggcaagaaaccagaatcttggggagtgatggggttctggggggttggaagagatctccttcctcccccattctgggagggagggccctttccactccctcctgtgggagggccctgtcctggccccactctggccagtagggagctggccccaggagccacttcatctgccctttccgctcctgtgacccgctgctgtctggttgtcgggagcctgagcttcagtgaggccgctgtgttacaaggggagagacccaggagcaggaggcaaggaagagctgggcagaggctggcagggggtgcagccatggcatctcaacagcccttcctggcccctatcccggaacttgcctcagccactgtcccttcttcctaccccacctgcctgcctcatccactctttatctcaatccaaagatgaaggagcaaatgtgagaaagttctatgccccagggtggccagacgagaaaccttcctcccgggggtcgggccacggtgctcccgtagtgaccactgcctgtaggatgctcaggctggttctccacaccccactcccctcgtagtcatccagatgccgtcccttccgcacccagcctggcctccctctgcctctgctgcagggctgtgctgtgcgggactcccctgtgagcagtagtccttagtaggactgaaatggaagaccattttgcctacaacacaaaccctttcctactgaaatattccacgttgccgctgccgttttccctttcccatagaacacaggaaattggtcagaattttcacttcacagatctaagtggtgaaggggtgcagtaaagttaaacattgggaatatattgaattaactgaaacccagccccatgaaggtttccattttaaatctcctctggagtcacctgcgacgggacctgatattctcatccttccctttatactctaccaggagggaataaaagtttaagaatacaatgttcttttctcagaatagctacagtttgttactgtgttccttgaaaagaaggatgagaactctccctcctcctgtatcatttggtaagtgcactgaactgttgagatcacgggactggagggctgccgcagcctctcctcggcctgtgttttgcactgtgaattctctgaccgagtcaggtgctacataggaggaggcctgttacatttaggagagcgtgtgctgggcttggaggccttcctagcaagacagctgcctttccagttcctaaattatgcattatgtggagtctgttgaaaactgattatgaaagagaaaaaaacagcttattttctgtgttgaagaggtctggggaagattgaagggcaaattctggcttgttttccacattccatgtgaatttcgttcagttggagaactaaattacagcaggaattacagctcagaaaaaaaattgtaacaccaaattatatctacagtgctgggaagtatgcttggtacagttcattaccacaatgaaaaccattgtattagctgactgaggacacagagagagctcagaagaggatgcaaacaatgacgttcctattcagtcctttcaagcaacatagagctgatctttatgggaccccagggaacccttctccatgatcccttgccttgatctctgcttctctgccctttctgagcactgaactcagtcctagagctctcttaggggtcatggctgtgataatatttgttttgctccgtcccttttgcaacagggggctactgccttccagagcattgcgctggagcatttgtaagacaaatcatacctcactggctaacactgactagcttcctaccctggataaattatgcaaaaatagtctttctttacgttgtcttatcaaagactatttttccacagggagtgagaagaagaaagaggttggggcaggagtgggctaaggaaacctgctctatgataaatacaggacaggttctcttagctcactcccgcaaatagcacacaagactattcttttcttttcttttcttttttttttttttttttgagatggagtcttgctctgttgcccaggctagagtacagtgatgtgatctcagctcactgcaacctctgcctcccaagttcaagtgattctcctgcctcagcctcccaggtagctgggattacaggtgcctgccaccacgcccagctaattttttgtatttttagtagagaccgggtttcaccatcttggccaggctggtctcaaactcatacctcgtgatccacccgcctcagcctcccaaagtgctgggattacaggtgtgagcctccgtgcctggccgcaagacttttcaatgcacctatgccagttatctcatcagtcctggcagaaacctcagcatttaaaaccgagtctcaaagacatggacatggccgggcacagtggctcatgactgtaatcccagcactttgggaggctgaggtggggagatcacttaaggtcaatagttcaagactagcctggtcaacatggtgaaaccctgtctctactaaaaatacaaaaattagccaggcttggtggtgcatgcctgtagtcctagctacttgggaggcagaggtgagagaatcgcttgaacctgggaggcggaggttgcagtgagcctagatggtgccattgcactccagcctgggcggcagagagggactctcaaaaaaaaaaaaaaaaagacatggagattattaatgatggcttcagacccatgtttggtgcctctttttgcctttaaaataagtgaagcaatcacagccagtatgctcacaagaccttccttgtagcagctgcagagcagtgtcaccctccccacatcaccttcttccatgttgctagtgtgaccctttgatgtagaccttgccccagcaaacatgctccattatcacacccttaccctccagatttcaacccagctccctgtgggcgtgtacccctctcctcctgcctcccacaccagaacacacccgggacgcagctctgccttggacgcctatgccccagactccctggcatttctgctggggcccctcaatcccctgtttcctctgcctggaatcctcctaacttgctaccacaatcaccccctccatttctctacccacttcttctcttgcaaactcctgttcatccttcaagattcagagtagcccctaagtatgtattaaagacttcatggtaattatttttaattgagctgtaaaatattccacatagtagataaatcacaggttaattcattattctattactgaatatttaggttatttcccatttttataatagaaataatgttgcattgaagattcttgggcttgggttgactcctacaggtggaattaacagatcagaaagtatttttaggctgggcatggtggcttacgcctgtaatcccagcattttgggaggccgaggcaggcggattaattaaggtcaggagtttgagaccagcctggccaacatggcaaaaccccttctctgctaaaaatacaataattaggcaggtgtggtggcacacacctgtaatcccagctgctcgggaggctgaggcacaagaatctcttgaatctgggaggttgaggttgcagtgagcccagattgcaccactgccctccagactgggcgacagagcaagactctgtctcaaaaccaaaaaaaaaaaaagaaagaaagaaaaaaaagaaaagaaaaaagaaagtattttaaagctcttgttacatgttgccaaactgcataaagagttgctttacaatttatattgcgaccagtaataaatatgcattttaacaagtctcattagtcctggataaaaaattttaaaaacgtaatactataaacaagacaggaaatcccattattgacttattttaaatttcctttgataactagtaaaactgcattttccgccgtttcctaattgcatttccccattagtaacttacctgttcataagttttgcttaacggtctttgtgtcctcccccatattgatatgtgagttctttccattagtctcatgtttgattaaaaaattttcttatttgaaaaaaacttcagagtaaatgttggagaggagaatttttttcctctaccttcctaggttcagtgactacaggctctgtaaatcaaactgacaaaagacagatcaacaagaggggaaaaaaggattgaattacatatgtacaaatgagagttcacaaagaagatgactcaaggaggtggttagaatttggggcttatatactatcttagaggtatatatcatcttaaagggtgatagagtgtggagaagaagcttgacaaaggaaaagcgttttggggcttctgggtaagttatggaaggtgactaggaaacgtgtggtaaataagtgttattcagtaaggtttgttaagcaggtaagagtcttctcaggtgctaagagttgtctctggagtagttatcttccaagtataggagagggagaccccttccaaatggaaatatatgtcctgcttttagtccaaaagggcagaggagcgacatatatctaattgccttcagcttgaaataatctttatgccgaagtggcatattttgggatggcgtcttctagtctccttcataaacatcagttctttgtgaagcatttccaacaatcccagccataatttatcactccctttttctttctatatttttacagtcttttctctttagtccacaatttttttttttttttgacagagtctcgctctgtcacccaggctggagtcagtggcacatcttggctcactgcaacctccgcctcccgggttcaagcaattctcctgtctcagcctcccgagtagctgggactacaggcgagcactaccacgcttggctaatttttatatttttagtattttatacttagtatattatatttagtaatatacttagtatttagtattttgtgtttttctttttaaaacaaaatacaaggccaggcatggtggcacacacctgtaatcccagcactttgggaggccaaggtgggcgaatcacttgaggtcaggagtttgagaccagcctggccaacatggtgaaaccctgtctctactaaaaatacaaaaattagtcaggcaaggtggcatacacctgtaatcccagctactcaggaggctgaggcaggagaactgcttgaacctgggaggtagaggctgcagtgagccaagatcttaccactgcactccagcctgggtgacagagtgagactctgtctcaaaaataaaataaaataaaaacaaaacacatttatctaagttattgtccaaagctggctccctaacaccccacaacctgttgataagacaaaaccgatctattgcttatagcaggcaaagctttggcagtatcttacagaggggaaggaaggccggaacttactgagaattggaaatttgattgaaggcaggtctttcaaagtgagagctggaatgagactgggtgagaatcacaacataatagtccacaataaacagcatggccaggattttgaggtgaggcattcaaagaatcttagagcccaaattgaagaattgacaggtctttgggaaaatcctgtaatgaacaatcaacatttgcctgggtaggagatgcctagaaaaataaagacatgctcatgaagcagaggcgtagcacaaagtcatcttaatacagacactaaggtatagctgggctctctgtgtccagactcagtatgagggaagatggtttgagttctcaatttctccttgtggtcattcttcagcccaagctgaaggaaaagccatcagtatgtcaatctagatattcaccagtatttgagaggtcatcatttcatatcaattgtctgttaacagttgtttcacatccagtttctggtggcagctgtttcaacctgcatgtcagtttttttttttttttttgagacagagtctcgctctgtcacccaggctgaagtgcatggcatgatcttggctcactgcaacctccacctcctgggttcaagcgattctcatgcctcagcctcccaagtagctgggactacaggcgctcgccaccatgcctagctgatttttttttttttttttttgtatttttagtagagacggggtttcaccatgttggttaggctggtctcgaactcctgacctcaagtgatctgcctgccttggcttcccaaagtgctgggattacaggcatgagccaacgcacccagccagattttccagttctttttagtggataacccttgctggatgatttgaatgatggcagcagtgcagtagcatttaaaactctggagatcccacatctgaatgctggcacacagacaaatactaagagaaggattgtcatcagagtttgtataatctacttctcagccaggatctaagagtgccctgactaaacaagaaagtagatctcatcccgaatctagagtccatgtaaccaaatatgaggttactcatcaaattacccaatttctgatttctttgtttacttcctagatctttttagtaatatcaaagatttcagagaggtctgcaggaatataagtacagcattcttccactaaaacagcacacattccccaccttgggagatcaatatcctatctaaggcagttctgttctggaccaccacccacccaatctcataaacctcttgacaagggagttttatggccttactggcattgtctaaatcatctgctgttctctcaaccacagcatgctacatttaccctactaatcagatctcttgtaaattatgaaacaaaggctgggtgcagtggttcacacctgtaatcccagcactttgggaggccaaggtgggaagatcacatgaggccaggagttcaaggccagtctggacaacactgcaagactccatctctacaaaaaaatttaaaaattagccaggcatggtggcgcatacttgtagtcctagctattcaagaggcagaggcaggaggatcacttgaggccaggagttcaagagcagcctgggcaatataatgagacccctgtctctaccaaaaaaaaaaaaaaaaaatttaattagacatgcatggtggcacacacctgtagttctaactacacatgaggctgatatgggaggatcacttgagctcaggagtttgagactacaatgagttatgatgactccactacacttcactctgggtggtagagcaagattctgtctcaaaaataagtaaatacatacatacataaaggcatgcatacatacataaagtatgaaaagaagtgtcttgaggggagaagaaagaaatctagaatacccctagggtacttaggatttcagttctcaaaccagggcccagtttttctccttcttcaatgaaacgatctactgacctcgttttcctagagaacaaattaatagatgatatcatagacaattctgagagtaggttttagtttacaaaggtaacaagttcctgtctagtttgtgagtaataggaggcttctgttccttatccagtatctgtcactgggggccattcagtcatctggttttggccagaatactcctatgggattgtcaaataatgctgtaaactgttggtaccattcatcatgaatagtttggtgtcaagcagttaattatgtagttttgagatcactaagtaggtctaaagcaaacaaaagaagaagaagaagaaagaagaaggaagaagaaagaagaaggaagaagaagatgaggaagaagaagatgaagatgaaggaagaagaagacgaggaagaagaagatgaagaagaagacgaagatgaagaaggaagaagaagaagaggaagaggaagaaagaaagaaagaaagaaagaaagaaagagaaagaaagaaaaagaaagaaagaaaaagaaagaaatgaaagaaagaaagaaaaaaagaaagaaatgaaagaaagaaagaaagaaaagaaagggaggaaaaaataaaactaatgtcttacttgtaagatctttgaaagcagatagtctccaaaaatataccacttgttccccaatccgcttataattctgtcagtgaaagtctgatcacaaagactagctctcacaaaaggtccccaagtagtgttttatggaggcagggcccttctaggacatgatgaaggttttggatttctccccacctgacctattgtggagttgccatctaaaaagtcatccaatggttgagttcagttacccaggaaaccaactgatttcttaaaaggaactggaaccgaatgaaactgggtagctcctgaagaaaaatgtgcaccctagacagttcatgggttaattgtagctgggtacgaaactcataccaaggaatgattaaggatgtaaatagaaatattaaaaatagaagtcttataatttacataactaaagtagccttaagtcagggagaggataggaggcaggtaaaagaataggaaagagaagaatattgattatagagtagtaacctgcagagttgggcataagctgtagatcttgggcataagctgtctacatctgaggctgtctgctttgggaggtctcctaagaatctttagcttgaggtcaccaataggaatggttttctagtaattttaggatggtgtatgtctcttgagttgaaggacatgatcaactctttaagagtttcaccagcatgttagtcattacctaatggagtccttccaactggggttctaaaatagttctttgttgaagacaaaaactctggagagtttaaggaagctttgggggcaaaacaaatagtatctgtaggtgacacagacttaaactggttgagggtaacttattactgaaaactttcaaaagtgaaacatttcatgacaatgaaactgatggaaaatttggatgcttccacagcatgcaaaagaagcaatgaaggcattctaaaagctttggtcaaaatgtctataatgattaagcatgttttaatagataatgtacactatatctaatttataaaggtggataaccataatttttacagagaaaaaatcttgaagtataacatataattatctaaaaacataatgtacatgacataccaagaaaatatcaaacatataagaaaaatatatcaagactatatgaagaatatcaagtaaaaagattcagtaagtatggaataggtcctaaacatctacattttaataaaagtccatagatatgtctgatgttcatctccaatagaaaagcactggcctgaaggaggctagattcaaattaaagaggaaacattgtgtccaaataaacattttaaatgataactgaattataactgataattctactgttgtctaacatcaggcagagcaccaccaggactctaacaaaaggaaacagaccatagacaatggaggaattaacaaatctctggatatagaacacataattgctgaaatgtttgaacattttacctacacaagttaacctagagaaggctaaacatctcttctgatttgacaagcttcccccaaaaccctaacaacaatgtatcaaataatcctaattgtttctggcacctgtattttaaataaggtgaaagaacaagtctctgtggccttctaggagccctctgggaaatctcaaaggtagtcttaggtaaaaaggtattctgaaaggtatttaacttcatttgagagtcaatcttaaaaacaaacaaaattgtctggagagttgaacacaggaataacatttggctactcatttgaaagtggcaataaaacatttaaaatatttaaaaacaagcttagaaggtaaggtgatcacccactaagaaccttaactctttcataagtgaagaacctttattatcttaaataaaatttcttttctgcaaactttctgctattttctatttccattcaggttttgtccttcactgttctctttaccattctggaacaactaggcattttactttaggacaaaactattctttttttcttaacaaaaacacgttttattactttgcatgcaaagttgtacctctctatcaagactgatcataatagagtatcatttaattataacttttaaccaaaggatcttctgtttcacagaacaaactggtaggatggataattgtcaactgtcacacatcagcattttagactagcagagctcctgaatgtacacaacacaactttcgacaaacacacacatcttgtatacagcttctcaaaagggcagatatgaacatgtgtgttaacaggcccaaacatataacttctctgtggcatgttttaaaaaaagaagcaaaagtaaataaacttaaaattatgtttagtaatcaatgtttcagaatcctttcttacttagaaattagtggccaggtgtggtggctcatgcctctaatcccagcactttgggaggccaaggcaggcggatcacccgagatcgggggttcgagacgaggctgaccaacatggagaaaccccgtctctactaaaaatagaaaattagctgggtgtggtggagcatgcctgtaatcccagctactcgggaggctgaggcaggagaattgcttgaacccaggaggcggaggttgcagtgagccaagatagcaccattgcactccagcctgggaaacaagagcgaaactccatctcaaaaaaaaaaaagaaagaaaaagaaagaaattagttaggcatctaatcaatatccataaactcaataccagttcaaggctttataatacctaaaaatcttgggaattaatttccaagctggcatactacaaaatataattactgttcacaaaaatgttcagagtaatgaatcattttagttaagcacaaatttaggtattttgtaaccttcaacatcaaatagaagtaatgctaatatatttgatcaaggaacctatataagtctagaaacaacatactcaagtagaataaaaacgtaagctagtcttttacttaatgctgaaaaaccaaagaaggcatagctgtttttatgaaattaaacataataaattagttcatttgccaaatttttacctaatttctgggatttttaaaatttatttgtgttttttggttttttggttttgtatttgtttagaaacagggtcttgctctgttacccaggctggagtgcactggtgccatcacagctcacttgggtaatcccactctctcagcctcccaagtagctagtactatcggcacttaccactatcctggctaaatttttagtttttttgtacagccaggatctcgctgtgttgcccaggatggtcctgaattcctaggttcaaattattctccctcctcagcctcccaaagtgctgggattataggcacgagccaccgtgcccagcctaagcacttaatatcttaattcagccaattaaatgagctcttttattttgtcgtcatcgttgttgttgttgatgattttttgacttttttaaaaaatatttttccagccaggcatggttgcttacgtctgtaatcccagcactttgggaggccaaggcgggcggatcacttgaggtcaggagtttgagaccagcctggccaacacggtgaaaccctgtctctactgaaaatacaaaaattagccaggcatggtggcgtgtgcctgtaatcccagctactcaagaggctgaggcagaagaatcccttgaatttggggggcagatgttgcagtgagccgagagcacgccactgccctccagccaaataggaaaaatatttttcctatccttctgaagtttgcaactcctttatcttcagaaaaacttctccttgagagtttcctcagagcatctcattcagcaatcatttcattttttaaaaacagacttcattttttagagcagttttaggattggagaaaaattttgccgaaattacagagttttggctgtgtgcagtggctcacgcctgtaattccaacactttgggaggacgagttgcacaggtcacctgaggtcagcagttggagaccagcctggccaacatggtaaaaccccgtctctactaaaaatacaaaaattagttgggcatagtggtgcgcacctataatcccagctactcaggtggctgaggcaagagaatcacttgaaccctggaagcggaggatgcagtgagccgagatcacaccagactgcactccagcctgggcaacagagccagactctgtctcaaaaaaaaaaaaaaattagctccatgcagtgacgcatgcctatagttccagccactcggcaggctgaggagggaggatcacttgagcgtgggaggcagaggctgtagtgtgctgagattgtgccactgcactccaacctgggcgacagaacaagaccctgtctcaaaaaaataaaaattaaaataaaaaacttacatagagtttccacgtataaccttctttcctcccctcaccgaatgtttctcctagcatgtcgcattgggtgtgctgcgtttgttacaactgatgggccaatacggatacattattaactaaagtgcatattttacactagagttcactctttatagattccataggttttgacaaatgcataatatatcatgtatccatcatcacagtatgacacagaataatatgcccccaaatgtcctgtggcccacctattcaaccctctctccctcccactgaaccctcagcaaccactgatcattttttccgctgtctctagagtgtctctttctccagaatgctgtatagttacaatcatacagcatataaccttttcatattgccttctttcacttagaaatatgcatttaagtttccctcatgtcttttcatcgcttgaaagttcatttcatcactgagtaatattccattgtatttattaccgcagtttgtttatgcattcacctattgaaggacatcttagttgcttccaagttttgataattatgaataaggtggccgtaaatatttgtgtgcaggcttttgttttgggacataaattttcaactcatttgggttaacacctcggagtgcaaatgctggattttatggtcaatctatgtttagttttgtaagaaactgccatactgttttccaaagtagctgtaccattttgcatcctcactagcaataaatgagcattcctgttgttctacatttttttatagcattttgtgttgccaataagcatgtaatagtatttcattgatgttttaattcacagttccctaatgacataccatgttgagcatcttttcatatgcctatttaccatctgtatactttctttggtgagatgtctgctcagatcttttttccattttttaattgtttgttttcttattcttgagttttcatgtgtgtattttggatacacgtcctttgtcagatacatgttttgcaaatattttctactagtttgtgggtttttttttttaattctcttcacagtgtcttttgcagagcagaagtttttagttttaatgaattaaaacatcaatttttctctttaatggatcatgcttttggtatcgtattttattctttgtttttatttttgttttcatttatgctgtggtattttaaaagtcattgctaaattgaaggccattgcagttttctcctttgttatcttttacagttttatagctttgtgttttacatttaggtttatgatccatttggagttaatttttgtgaaaggcataaggtctgtatctagatttttggttttggcctatgggtgcccagttgttccagcacaatttgttgaaaaaaactatcctttctccatcgtcaaaggttggctatatttgtgtgggtctatttctgagctctctattccatcccattgatctaattctctttcaccagtatcacaccatcttgattactgtacctttatagtgttgatgtgtatgaagtagagctttagagtcttgatgtggattgtgctggatattctgggtcttttgcctttccatataaactttagaatcagggctgggtgcagtagctcacgcctataatcccagcactttgtgaagccaaactgggaggattgtttgatcccagggctttgagaacaactcaggcaatacagagactctacaaaaaaaaaaaattataaaattagctgggcatggttagtgtgcacctgtagtcccccctacttgggaggctgaggtgggaggattgcttgagagcaggagttcaaggctgcagtgagctatattcgtgccattgcactccagcctgagcaacagaatgagaccctgtctctaaacaaacaaacaaacactttagaatcagtttatcaatatccacagaataatttgctgggattttgattgaaatcgcattaactctatagacaaagctgggaagaacttacattttaataatgttgaatgttccatgtttgttccaaggaacattcatttatttaagtctttgagttctttgagttctttcatcagaattttgtagtcttcttcatatagctcttacacatattttgttagatttatatataagtttcatttatttgtttgtttgtttttgagacagagttctgtcacccatgctggagtgcagtggcacaatctcggctcactgcaatgtccacctcacgagttcaagggatcttcccacttcagtctctgacgtagctgggaatacagactcgtgccaccatgcccagctaatttttgtatttttagtagagacggggttttaccatgttggccaggctggtctggaactccggacctcaactgatccacctaccttgacctcccaaagtgctgggattataggcatgagccaccgtgacctgccaagtatttcatttttttagttctaatataaatggagttgtgattttaactttaaatttcagttgttcattgctggcgtataggagtaattgacttttgcatactaaccttgcatcctgcatcattgttacaaaatggcttattggttctaggaggttcttgtggtttattttgttttgtttttgtcaattctttgagattttctacatagacaattatactatctgtgaacaaagacagttttatttttttgttcccatttagtctactgttaatatccttttattatcttactgcattatctaggacttccaacacagtgctgaacaggtgacaggagacatccttgtcttgttcccagtcttgaggggaaagtatctagtttctcaccactaagtatgatgttagttgtaggggttttgtagcaattcttcatcaggttgaggaattatcccctagtttgctgagaacttttttaatcatgaatgggtgttgtatttttttaatgttttctctgcatctattgatatgatcctgtgattgtttttcattagctgttgataagatggattacatcaattgattttctaatgttgagccagtcttgcatacctggactaaatcccatttggccttggtatacaactctttttatatgttcttgaattcaattttctattttattaaggatttttgtatctatgtttataagagatacaggtctgtttttgtctggtttttgtgctagaggaatgctggcgtcatgaaatgagttaggaagtgttccgtttgcttctattttctggaagaaatgctaaagaaattgtattatttcttctttaaacatttgacaaaatcaccagtgaaatcatccaggcctggtgttttctatttaaaaggttattaattgccgagacaatttctttaataaatataggcctattcagattacttatttcgctttgtgtgagttttggtagattgtgtttttccaggaatttgtcgagttcttctgggccagcaaatttatcagcatcaagttgtctgcaatactcctttattatccttttgttttgttttgttttttgagacggagctttgctcttgttgcccaggctggagtacaatggcaccatctcagctcactgcaacctctgcctcctgggttcaagtgattctcctgcctcagcctcccgagtagctgggattacaggcacccgccaccatacccggctaatttttttgtatttttagtggagatgggggtttcaccatgttggccaggctggtctcgaactcctgacctcaggtgatccatctgcctcagcctcccaaagtgctgggattacagcatgagccaacgtgcccagcctcctttattatctttttaatgtccttgagataaatggtgacgatccctcttttatttctgatattaataatttatgtctccagcctgggcaacggagcaacaccctgtctcaaaaataaatcgataaataatgtatgttttctcacctttgttcttggttagcctggctagagggtcatcaatattatcaatcttttcaaagaacctctctatgatttcatgcttctctccatcgttttcttgtgttcaatttcattgatttctgctctaatttttattattctttttattctgcttactttggatttaatttgttcttttttagttttctacagtagaagcttggcttattgattttagatcttcttttctaatagatacattcaatgctatgagtttctttctaagcactgcttttgctgcatcccataaattttgaccagttgtattttcatttaaatgtagtccaaaatattttttcattctcttgaggcttctttaacctatgtgttatttagaagtgggctgttttatctccaaatattttggtattttccagctatctttctgttagagatttctagtctaattccattatgatctgagagagtatattgtatgatatctattgtcttaaatttgttaaggtgtgttttatggtccagcatatggtctattttggtgaatgttccatatgagcttgagaaggatctgttgttgttggatgatatattctatacatattaatttaatccaattgattaatagtgctattcagttcaactatgtccttactattttctgcctgctggctctgtcagtggttgatagaggaatattaaagtctccaactatagtagtgaattggtctatttctccttgcagtttttttatgtttttgttttgttttttgagatggagtctcactctgtcgcccaggctggagtgcaatggtgccatctctcctcactacaacctcaccctcctgggttcaagccattctcctgcctcagcctccaaagtagctgagattacaggcatgcgccacgatgcccagctaatttttgtatttttagtagagatggggtttcaccatgttggccacgctggtctcgaacacctgacctcaggtgatccacccacctcagcctcccaaagtgctgggattacaggcatgagccaccacacctggtcttgcccttctttatccccgataattttacttgctctgaaatctgctttgtctgaaattaatacaattgctcaagcttttttttttataatcagggttaacacgattatctttctctgccctttacttttaatctataagtctgtttatatttaaagtgggattcttatagacagcatatacttgggtcttggtttttgatccattctctgacaatccctttctttagttggtgtactgagattatttatacataaaatgattattgatatagttgggttaatgtttaccatatttgttgctggtttctctttgatgtccttgttctttgttcctatttttatcttccactctttttctgccttctgcagttttgattgagcatttaatatgattccagtttatctcctttgttagcatattaattttgcttcctttttactttttaaaaaaggtttgttctagaatttgcatttctaactaattcaagtccacttttaaataacactatatctcttcatgggtagcgcaggtactttataaaagggtattcccaatgtctccctcccatctctttgacattgctgtaattcatttagcttatccataagctatgattatccaacatattgttgctattgttatcctaaacaaacccttatcttttaggtcagttaggaatttaaaaagaaggattttattttttattttttatttttattttttttgagacggagccttgctctgtcacccaggctggagtgcagtggtgcgatctcgtctcactgcaacctccacctcctagcgtcaagtgattctcctgcctcagccttcccagtagctgggattacaggcacgtgccatcatgcctggctaatttttaatagagacggggtttcaccatgttggccaggctggtctcgaactcctgacttcatgatccacccacctcagcctcccaaagtgctgggattacaggcgtgagccaccaggtttggcctattttttctttatttattgcttcttgaatgctcttcctttatgtaaatccaagtttctgacctatgtcgttttccttccctctgaagaacctcctttaacattttgaggggctggacagggtggctcatgcctataatcccagcactttggtagcctaaggcaggagaatctcttgaggccaggagtttgagatcagcctgggcaagatagtgatactccatctttaaaaaaaaattgttttttaattagctgggaggctgaggcaggaggatcacttgagcccagcagtgcaaggttatagtgagctatgatggcaccactgcactccagcctaggcaacagagtccctgtttctaaatgaaaataaaataaaactttttttgcaaggcaggtctactgacaacaaattatctccgtttttgtttgtctgagaaagtctatcttcctcacttttgaagaatacttttgatggatacagaattctgtccttttttttttttccgtcagcactttaaatatatcactctactctcttaacttgcacagtttctggagcaaaatctagtgtaattcttatctttataccaacaggtaaggtgagttttttcctccagcttttttcaagattttatctttgtctttggttttctgcagtgtgaatacgatatgcctaggtggagatttttggcatttatcctgcttgatgttctctgggctttctcgatgtgtggtttggtgtttgtcattaatattagaaaattcttagcaattattaattcaaatatttcttctgttcctttctctgtttgccttctggcattcccattacacatatgttactccttttgaaattgtcccacagtttggggatattttgttccatctctgaaatttcttttctttttgctttcagtttgggaagtttctattgacatatcctccgcccactgactctttccttgactgtgaccagtctactaatgagcccatcaaaggtgttctttacttctattatagtgtttttggtttttaccatttcttttttattgtttcttagagtttcaatctctttgattacattactcatctgttcttgcatgttgtccattttatccattagatctgttaacatattaatcagttatttttattttattttgttttcttcagatggagtctcgctcttgtcgcttaggctggagtgcactggtgtgatctcagctcactgcaacctccacctcccgggttcaagcgattctcttgccttagccttccaagtagctggaattacagacatgcaccaccacgcccagctaatttttgtatttttagtacagatggggtttcaccaccttggccagtctggtctccaactcctgacctcacagtgaaaatttggtagggctcctggaggtaaaactgatgaaagtgcgcccccaccaaggcagtcattctcacccagaccagaagctttcagaataggtggcctttggacctagagggagaagagatttctttccttagccattgcaaggtttgtggatgagaccccaataacaaaagacagattaacaagataaacgcatccaattttatttaatgtaagttttagggaacacaagagccttcagaaacgaagacccaaatatacagggaaaactgtatttttatggagagttgtgcagaagtatgatcggaggacaaaagggtatgatgtcatggtaatcaaccagggggaagtagcaaggcctgtttgttccgattcctcttggcctctctgtgtgactttcctttccttgggtatagggcaggacacctgtcacaggaggtcttcaagggagacgggagggagaaggccagagagtgaccttcctgcttctgcagttttcttagtttccttcagcttaaaatactcaacatgccaaggtgccatactttggggtgtcctgttctgagccccgcagagctcacaagctctcggaatcatcttggacgtctgatttctcacggccggggacattttcctgggcctgaggccgttggaaccagaactgtccattttcccgccccggcaggtgacaggctgggaaggagatcctcaagcaagcgggctctcaaagccgaggggaccccaggcaggcgcggagctcagcgaagccagaaggagcgcgccgggggcagcccaagcccggggtctccccggaggaagcaaacagggcgcaggagacacagagaagagctgggggagcaggagcggggcgaggcagagaggacctgcgagggcaggagaaagcgcgacgagagggcctccttccaggagcggacagcagccccaaagagggaaaaggagattccgaggagggaggagaagtcgaagcggcagaagaaacccaggtgtgttgtggctccgattctgggcattcgctccgcgcgctcccgctccttcgcggcccttccccttcccccgtgagggactgatgcccccctccccggggagaggcagcccgtgccctcgctctggcttccgtgcctcccagcccttaccactgccccactctgcggtgggttcttcatcccagaaccgggatgaagatcgcgggtccgcgcgggggagtggccgcgggctctccactccagcgcctcgtggcacccggtgaggcggggcgcgggtggagaggtggcggggcgcgggtggagaggtgacagggcagcgggtgggacacgatcccgcgtcccctgaactccagctggtgactcaccccggctctcgaagaggaggagctgagcgacatgaacaaaatcggactcaggaaccatctgagggcttaagcacacctcgttccggcttccggatctgggccagtttcctctgctggaaatgtggcactggtccaggagaccttcaaggatgctaccagctctgaaattctggagcttggaggttttatttgttttgcctcctttgttccattaccattggcaccaactagcacgtgtgggttagtggacagggccagcttatggcatcagaaagtgaagatttggggttcatgtttttgttatcaattttaataggtgtctctctctttgcctccctttttcagtcattgaggataacagatgccttattcgttgctcatattgttttaagaattctttgtgatagaataggaattcttttgcaacagttgggaatattaggattatggtgaagagttgatgttctttcccggtggtttgtagcaaatcctttttgcccacagcctcagttgggtgctccatcttcctctccacctttacagagaggcttttaaacaagggcactgatttttttcctgtcgccatgccaaccatcctggcttggttacagcctttgtctactgtctggttgctcccagacatgaactaaagaggtaaagggtgcatcgtgcccttggccatttaaaaataacgtgaatgcaccgttgatgggccctgggtgccctgaactttagagggagcctgtaccatcccaatgggccacagactcatttatgtcattttcagctgagggccatgccaaggcattagagagatgaaaacattcagttcccgttgcctagatactgacagtgtggcagaggagataacacataggcattggtaatcctaagacaaggcagaaagcaatatgcatgcaagacaggacttgatggagcgctgaattccccgggtgctgggccatcagggttcctccatggagaaggtgaacatcccagtgaggctttgaataacaggtggaatctaaataagcaatgactgaatgtccaacaccccaaactgtgggaacaccctacgcagagactcaaaggcagatatcatcaattgggtgtgcatgaagtatggcaaaaaaaaaaaaaatatctctgtgttctaggcttttcaaccttcaagggcatcctaaaacttcttctttgctccccaggagttaatcagaagctaaaacacccagaggctgctgcaaacctgtctctaaaacctgcagtaacccaagcccacaccctaatactaccatttatgaaacacactcaggctgcccagccataacccttccttagtcctttcctttacctacccgattgggcgctgtctcactcagctgagagtcactatttttcatcactaaaggagtcagaggccgggcgtggtggctcacgcctgtaatcccagcactttgggaggccgaggtgggtggatcgcgaggtcaggagatcgagatcatcctggctaacatggtgaaaccccatttctactaaaaatacaaaaaattagccaggcgtggtggcgggtgcctgtagtgccagctactccggaggctaaggtgggagaatggcgtgaacccaggaggtggagcttgcagtgagccgagattgcgccactgcactccagcctgggccacagagcaagactccatctcaaaaaaaaaaaaaaaaatggagtcagaataggctggaggctgtagggagcacacacagacacttggattttgtgacaactgagcacatagtattatctgggagatggggagctccccagctggaaattctccacagccctgctgtccaatatgacagccactagctgcatgtggctgctgagcacttgaaatgtggccagtgtgactgagcaactgaattcctcatttaattgtaactcagtgttaatgccactgagttgacataagagttggtgaatttacttaatttggacagatgtagttttgaaactgatttgatttgactttgaagccaaaacagttcttctacaaaaagacaaactactgttgtcaatgcagatacaaatatcaaaggaaaaccatattctgctacttgattcagttcttgggaatcttttaagtatgtctaaaacaatttgggcaaatctacttttttcacctataaacttatgaaatataaatacaaattaaatatatctgatgaaagtttatcatctgaatagccttgcagtatgagtacaaaatgaacagtgacctttgaagacagtattttttaaaggactgaaatatctctaataattttatattgattacaggttaaattccagtttttaatatatttgagtaaataaactgtattattaaaattgctttaatccattgctttttaccacttcaacgtggctactagaaaaatttgcattacagtaagtggcttgtgtcctatttctgttggggaacactgagctggcatgtggtttgtgggaggactcagagaaatggaggatggggaggcagccctccagggccctgggctacagggtagaattttggcctccgctgccaggcaatgggagtcactaatggcttctgagcaggggaaggggtgccatcttccatgggcccctcctcattccacagcacctgaggacaccacctcctttccaacttccctctgcctccgccctggctctgcctccaggtcatcctccttggcctccagtgcctctggtggggagtccctgtccgaggaggaactggcccagatcctggagcaggtggaagaaaaaaagaagctcattgccaccatgcggagcaagccctggcccatggcgaagaagctgacagagctcaggtgagcaggctgcgggtcagccagggccttccgatgtccacagctccttctgatgggaatgggagccctccctccacatttccccaaaggggcttgatgtgagggggctgctccagcgaggacagcactcagggagccccatgagagccaaggcggccgtgctgttcgccagcaccacagggcctagagggggagccatggaagactcggaggactcccgacctgtgcccatgccttcccttgcctggctgccccttttatcccatgccacacttcatctcgtggcttctgtgcctccctcacagcccaacagagacatgccttctcctggaagctttctagaccccttctcctcaagagcagctctctctcatgttcctggagcacccagtgtctctccatgtgtacacactctcgcttgcgtgatttgcacggtgagtgggagagggtctgcctgagccactgtcacatccccattgcctggcaccaggccaagctggcccccatgcaacatgaatatcactctgtgaatggcaacaggcctcctgcccatgccactcgactcctgttttctactcagccacttctttggtttccatgcaaaaggctgatgcacggagcatttgatgattctggggtctttgctgcagttttaaaataacagtagactcacacctgtaatcccagcactttgggaggccaaggcaggtggatcacttgaggtcaggagtttgagaccagcctggacaacatggtgaaaccccgtctctactaaaaagacaaaaattagccgggggtggttgcgggcacctgtagtcccagttactcgggaggctgaggcaggagaatagcttgaacccaggagacagaggttgtagtgagccgagatcatgccactgaactccagcctgggcaacagagggagactctgtatcaaaaaaaaaagaaagaaaagaaaagaaataacagcagtagtcatattacatactttttgagtttctgctaaaaagttcctatccaacatgaccgttttccccaaggtccctctgtttttttgccacagcgttgggagtggcactccccccgtttcctctgtaggaagcccatgctccctggctcctctcatacatgagcttcctcattgctcgttcaaactcctcaccctttattaagcacagcaatttggcagccatgtttttgcagtatttaccccaacaggcacagtaaagatctagctacaccaacactgggccgaccccgacaaggaaaacagagcttaccccacggccctgcaaattattacgtcatctcctatatggctgcaagaagaaacacctcctcgtagtgcctccaggcctatgctttaggccagtgctgctgagcaccagagctttctgcaatgatggaaatcagtcaaaatctgcactgtgtaacatatagccactaccacgtgtggttactgagtgcttaaaacagattagtgtaaccgaaaaactgatttttttgttttagcttttatttaaacttaaatttatgtatagcatagtgactataattaataacaatatattggatacctgaaaattgctaagaatagattataagtgttctcaccacatacaagaaacaagtatgggaggtaatgcgtatgttaattaactcgatttgacaattcataatgtatgcatatatcaaaacagcatgtacaccataaatatatacaatttatttttaagagacagagtcttgctctgtcacccacgctggagtccagtccaccattttaactcactgtggccttgaattcctgggctcaagtgatccgcctgccacaacctctccagtggctgggactacaggcatatgccaccatacctggctaatttttaaatttttttgtggatacagggtctcgctatgttgcccaggctgatctcgaactcctggactcaagcgatcctcccacctcagcttccccaagtattgtgattacaggtatgggccaccacacctggcccatttgtcaattaaataataaaataacaaattaattttaaaaatttaaatagtcccatgtggtgagtggcgacagtgtggaagctagactcagctctggactgtcttccttctcagcctcctcttttttttttttttttttgagatggagtatcgctctgtcgcccaggatggagtgcagtggcacaatctcggctcactgcaacctccgcctcccaggttcaagcgattctcctgcctcagcctgccgagtagctgggactacaggcgcccaccaccgtgcccagctaattttctgtatttttagtacagacggggtttcaccgtgttagccaggatggtctcaatctcctgacctcatgatccgcccgcctcggcctcccaaagtgctgagattacaggcatgagccaccgcgcccggccctcagcctcctctttttgaatcctttctccctgctccctccaagctgggctccttctcctgccagcagggcagaacagccatctgtcactctaatagaacctcactcccactcaggtgtcaccagaacacatcttttattaacagtggaaaaagtgcagccttgatgcctatggaaatgagatctccagctggctggaagtctcagggaccgtgacaatccctgagggctcctcagctgccagaggagaaatctgacatctccttcctgcctctgaggggcagagttcctggggctggcaggataggaagaagctaaggcctgagaagccaaggagacctatgcctctctcactggagtgggcctccccagcaaacagtgggtctcctttccctggacctccctcctgtctcttcctagcttcttcccttccccaaggctccttatcctggactcagatttaagtctctccagcctctagtctccacccgagctggtgcctctgcctagaagatctgtgctttctgccacctctccttgctaactcctacacaccttgtaagactcgggccaagtgcctcctctgcagggaggtccccattgcccctccccacaagcaggctgattgatttactgtccctctcattccaaggcactgtccactctcttgactggatgctgttcttgttttcagagctgtctctttttcatcatttactatcaattcctttttatatacagccagtctttgctgggcatgccctttgtgccaggcactgttctgagtgtggtatgtataacaattcactgaatcctcacaatcaccctgtgatgtcggtactgccattattgtcaccattttactgatgagaagactgaggccacacagcaagttaagtggcgcagccaggatttggactcaggaattctggctccagagcctgcactgtttttttgtttgttgtagttgttgttttagagacaaggtctcgctatgttgccgggactggtctcgaactcctgggctcaagtgatattcccaccttggcctcccaaagtgctgggattacagagcctgctctcttaatttgtaatcgtctctccagaattaccagacattcgagaacgcaacccctttgctaccagtatgatttcttcttctgaaaataaagtctccagttgcagacggcatccccatactacatcctctcttttagaaatagtagtgtgggggccccattctctggcccagtcaggcactggctgacctgagcatggttactgtagactatctaaaaaggcttgctagtgctgggtgtggtggctcacacctataatcccagcactttgggaggctgaggcgggcagatcacttgaggtcaagagttcaagaccagcctggtcaacatggtggaacctcatctctactaaaaatacaaaagttagccgggcgtggtggtgtgtgcctgtaatcccagctgcttggtggctgaggtaggagaattttttgaaccaggaagtggaggttgcagtgagccgagatcatgccgctgcactccagccttggtgacaaagtgagactctgtctccaaaaaacatatgaaaacaaaaggctggctggacataaaaagcaacagcagtgagttggggcaaacctgaattcacacctctgccacatctggagactttggttggctacccaatccctctcagggtcacttccttcccttaacctctctgagcctaataattctcacttgtaaaatgggaataataacatctacctcacagggttgttcaaacaatttcaaaatatttttattaagtgcccagcatataatatgcaattaaaaaatagcgattactgttattattaaagcttgaacatcttttatgcctgacactatgctgagccctgagagatgaggttggggaacaaagatgaatcagagaagcatgtggacatcatcaataatgatacacagtaggatgtgaagttggcataacagcttctagtgcccatgaatcagggatatttgctttaatcatagaattaatcaggtctgtctctcagctttgtccaaagcctgatatcttagaaaactacccaaactgctttctttcttcagagtgattagaggacttctgcttctaggtagatggagtagagacgcttttccctattcttcccactaagtacaatgaaaaccctgaatgccatatttaaagcaaatataagaagatttgaaaaggtagaaagaagaaggcaaactggctaagaacctcaggaccaaagggatgaccagggcattgagttccttggattttcttttttaccttctatatcccagactggctattggaaaagctggcaaccccaaaactccaatggaggcagccaaaaaaaatgccccaagaaaaatctgctatttctggccaaaggaccagggaagaaacagactggcaagacagaaaacttttggacaataactgttctccagccaaataccacagacaaaacaacagcccccattgccaaccctggcagcaaaggcaagtggggaagcctggatacccacctttgccaggccaaagcaaggtgccccaatacccctaaccagggtgtgccagaggaggctgagtgggaagcaggaattttcatccccagcaggtagtaatgatccctccttttccccatggtttcggtgaggaccatgtggggagtctagactctcaccatgacttggaagtaaccaggcttgagtggaggcctgaaccccatccctgctcagcggtaacaaggagcttctcctcagcctcaggtgtcaaaggaggccaaatgaagaacctggactttcacccccacctggaagtaatcaggcaacattacctacaactaccatagcaatgtcagaggaggcctggtaaaacataagatttaaataatacctagagtcttataatatccaaaagtccaggtttcaattaaaaatcgcttgccataccaagaaccaggaagacctcaaactaaatgacaaaagatgatcaacaggttttaacaccaagatgacagagatgttagaattgtctgacaaaggttttattttatttatttttattttttatttttgtagagacagggtctcactatattgctcaggctggtctcgaactcttggctcaagcaatcctcccacctcagcctcgcaagacactgggatcacagacatgagccacaccttgcccgacaaaggttttaaagcaaccatcataaaaatgcttcaatgagcaattgtgaacacatgaaacaaatgagaaaaacagtctcagaaaaaaaatagaagctataaagaggaacaactggaaattttagaagtaaaaaaatacaataactgaaatttttaaaactcagtgagtgggctcaacaacagaatgaagagaacagagtaaaaactcagtgaacttggagatagaacaagagaaattacccaatctaaactatagagagaaaatagcctggaagaaaatgcacagaacttcaaggatgtgtgggactataataaaagacataacattagtatcgttggaattccagaaaaagaggagaaaaaggatgagactgaaaaagtattcaaagaaattatggctaaaactgtctcagatttggcaaaacttacaaattcaagaagcaaaacaaatcccaagcaggataaacccaaagcaaagaaattcattccaagacacatcatagtcaaacttctaaaaacttgtaggcagtcagacagaaacaaaacatcacctacagggaaaaaaacacaattataatgacaagaaacttctcatcagaaaccatgaagggcatgccctttgtgcctttgttattatttatatatcttcacagagttcaaaaaaagtttgctgtgcccatggaaattcataaaccaggtggactcttcacagtgactggtcttcatagtttgcaactagcctttggtagggtcccctgttctcttgggggtttgctggatgtctggacacagagtctgaacagagagaagagaagcgtttgctgctgggctcaatgactcaggcgcaagagctgcccctacttttgagaattgttaactgaagctgctaaatcttaaaacctggcacatttaagctcatagaactccaagtgcttttgagtatttgcccacttgtaaaatacaggaagaagacaaaaatatgaatattgtgaaaccattctttgttgttgcagtggtattggtgttcactgataagtcactggcaggacatctcctgccaagggggggaacagggagaagatcccattgaggaggacatacagcccagttcttgaccctgggtttaggagtaggacaggcagcctcactagcattgagacactgagacatcccaataaagccagcctcaaggttaggatgcaacttcacacgtatcaactgtccacacttgtaccttggaggcagcaggaacagtggggtaggcattttgtaggagcagtggtgactgtagcaatagcagccagacacacacagctccacaacaccttcttccatctgccctaagacggacttcattcttcactcgcatgattgggtttatctagtggttgctgataaactagctttctgaggtgtgggacaggaggaggagccctggtcatagtatttgctgatttccgtggtctaaatactcccaccatggccaactcaaagctactaacagtttaacaactggttggccaagttcctgaagatttaacaatctgttctcaaaggctgtcctcaccaggtccagcaaccactgcagaatatttaatagacaaattgattcatttgtttctcatccaactttaacagggtgctcattcactcactcagtcaacatccatgtgttccacaaatacctatccaatgatgcctgacttacaatggttcaacttataatttttcagctttacagtgggtttattggatatactgcatcataagttgaggagcatatgggcttatgatggttcaacttacaattttttacttaatggcctttttggggtattaagtacattttcaacttaacgatgttttcaacttacaataagtttattggaacataaccccttgtacatcaaggagcatctgtattaattttatattgctattgcaacaaattaccacaggttaagaatttaaaataccactcgttaattagtgcacagttctgtaggtcagaagtccagcatggcatggctggattctctgttcagggtctcatcacaccaaaattatggtatcagtagggctgcagttctcacccagggctaaggttctcttctgagctcactgattgttggctgaattcacttccttcttatgctttttgtgtagcccctccagaggggccccagacacagagagtcaagaatattcctgctccacgtttgataaaatctaatattccttcatgataaaagcctccaacaaactaggcattgaaggaacatacctcaaaataataaaagttatctatgagaaactcatagtgaaattcatactgaatgggcaaaaactggaagaatttcccttaagaactggaacaagacaagaatgcccattctcacttctcctattcaacatagtactggaagtcttaatcagagcaatcaggcaagaggagaaaaatgaaaggcaggaaagaaggaaataaaagtaggaaaagaagtcaaagtatctctctttgctgattatatgattctctacctagaaaaccctaaagactctgccaaaaggctcctggaattgataaaagacttcagcaaagtttcaagatacaaaatcaatgtacaaatgtacaaaaatcaagagcatttcttgatctagtaacattcaagcagagaaccaaatcaataatacaatcccatttacaatagtcacaaaaataaaataaaataaaataccttggaattcatctaaccaaggaggtgaaagatctctacaaggagaactacaatacaatgactaaagaaatcataggtaataccaaaaaaaaatccatgctcatggattggaagaatcaatatcattaaaatgcccatactactgaaagcaatctacagattcaatgctatttctaccaaactaccaatgtcatttttcacagaaatagaaaaaaagattctaaaattcacaggaaccaaaaatgagcccaaacagccaaagctatcctaaacaaaaagaataaagccagaggcatcacattactcaacttcaaactatactatgaggctacagtaacgaaaacagcacagtactggtacaaaaacagacacatagaccaatggaactgaatagagaatgcagaaataaagctgcccacctacaaccatctgatcttcaataaaatcaacaaaaaacaagcaatggggaaggactccctattcaataaatggtgctgggataactggctagacatatgcagaagagtgaaactggacccccgcctctcaccatacacaaaaatcagcacaagatggattaaatacttgaatgtaagacctaaaattattaaaatcctagaagaaaacctaggaaatatcattctggatattggccttgggaaagaatttacgactaagtcctcaatagcaactgcaacaaaaacaaaaattgacacatgggacctaatcaaactacaaagctgctgcacaacaaaagaaactatcagcagagtaaacagacaacctacagaatggagaaaatattctcaaactatgcatctgacaaaagtctaatatccaaaatctgtaaagaacttacacaattcaacaagcaaaaaacaaataactccattaaaaagtggacaaagaatatgaacaaacacttctcaaaagaagacatacaagcctccaacaaacatatgagaaaattctcatcatcactaattatcagaaaaatgcaaatcaaaaccacaatgacacaccatcttccaccagtcagaatggctattattaaaaagtcaaaacctaacagatgctggtaagggtgcggaaaaacaaacaaacaaacaaacaaaaaacacttatacattgttggtgggaatgtaaattagttcaaccatcgtggaaagcaatttggagatttcttaagaaacttctcttctgtttttaagggctcatattattttattacactggggccatgcagatgacccagaataatctccttattttaaaatcaataatcttggccgggcatggtggttcacacctgtaatcccagcactttgggaggccgaggcaggtgactgcttgagctcaggaggtcaagagcagcctgagcaacacagtgagaccctatctctaaaaataaataaataaataaaataaaatcagtaatcttaactacattttaaaagtcctttttgccatgtaacatattatattcatgggtggaacaccaccagacgaaggtcacaggggccacagttctgcctaccatgcctgttatgtacctcgcactcttctcagcatttgggaaacttcagtggataaaacagacagaatgtcgtgccttcatggaatttatattttaaccaggggtatacaaagacataagccttcacacatgtgtttgaggcttcataattcagatttcctctggttaggtgctaactgaaatcctgcttttttttttttttctaagcagggaggcccaggaatttgtggagaagtatgaaggtgccttgggaaaggggaaaggcaagcaactatatgcctacaagatgctgatggccaaggtgtgtggggtgggggcagtgaatctgttgggagggcttgctcagctttggaatctggcgaccaacttcggcaactgcccagcttcgccatttgtgtccagctgcccccagaatcctgggtgtgagggccacctgaccattctgatccatctaggcatggaaaccaatcgtatcctgccaatttctccatacttactgtgagggcttcaatacatttgagacttgtcttctctccagtgaatacacttagagaactaatgatgttaaaaccactgggattttattttccaaaccccaaatcaggacaggttgagttggtggagacccagaagggctgtggtgtgatcagggtcacgtggatgataaacagcgatgtccccagacggatgggggcagctctgttttgttgagttgtatcataacctgggcatctgatttaagttagggtaatgtttcatgttggatatttaaagtgagacttactgaagtatccttcctttacccactgatttgaaaaactaccattctcattcacttaattcttgtacagagcctgtttcagggcttttattctgaacaatcatttgatgtcattacctcaatgacatcaaatgcctggtagttctaggttcccctttttacctttggttttttgtttgtttgtttttagaaacagagtctcactctgccactaaggctggagtgcagcgtcaccactccagccttagtggcagccttgaactccttggctcaagagctcactgcagccttgaactcctggcctcaagagatcctccagcctcagcctcagcctcctgagtagctaggactacaggtgcactccaccacaccctgataaaactttgtttttaaaaaataaaaaaatgtcttggctgtcttgcccatgtttctacatgcatttttaaaaatccctttgccaagttccaccatagtgtattgagattttggttggaatttcttttaatcctgtatttaatttgggacttccttatctatacaatatttagttttcacatctaggataccatacatttctcaagcccatattatatccttaagcaaagtttgtcattttctccctatagatcttttccatgttttatttctgcacatttgatagcctagttgcttttgcaaatgcgatcatttttcaattatttaataactagttattggtagtatgtaagaaagctacaaatttttgtgctaattttatatctggttctcttatggtactctcttattaattcttttttttttcttttcttttctttttttttttttttttgagacggagtctcactctgttgcccaagctggaatgcggtggcgcgacctcggctcactgcgagctctgcctcccgggttcacgccattctcctgcctcagcctcccgagtacctgggactacaggcgcccgccaccacgcccggctaattttttgtgtttttagtagagacggggtttcaccgtgttagccaggatggtctcgatctcctgacctcgtgatccgcccgcctcggcctcccaaagtgctgggattacaggcgtgagccaccacgcccggcctctctcttattaattctaatctttttcatctgattatgttcataaagatgtttttgttgggttctcctaaatgtgacatctcattccaattctaaaatgtgaactagccatcctagaacagcatcaattgataatggtgatcatagctctccttatctttgcatcactttaatgagaatgactctaatgactttcacactaagctgatgggagttgatggcttgaaatagattttctttgtcaccgtaaaaattattgtctagttgttgtttagtaagacttccatttcattggaaatagataattaggttttattaaacaccttttcctttatgttattaatttttttttatttctgggataacctcagtcacggtacattacttttaattccacagacacgtttgattttccgatattttatttatgatttttacatacattttcataagattgatatgaatttgtgtgtgtttgtacacaagtgtatgcatgtgcagtatcttggcagattttaacattaggactgcacttgcattataattgtaaatgaatagcgttacctcctctttatgctgtaaatcagttttgggagcatgataatacactttttgttaattttaaagatgataacctttcaatagtagagatcgagagccatttttatagaataccttgaaatttttttcaagtattcagtttattgatgtactcaagttttaactttttcttgagaccatttcaataattcatattcttcctgaaacttgatcatttcattaaaattttcatatgtgttaacagaaagtcgcatatggtagccccataaatttgtaattactttttatatctgttgggtttgaatctttcttattcctttgtttttttgtttttttttctctgtcgcccaggctagagtgcagcagcatgatctcggctcactacaacctctgcctcccaggttcaagcaattctcctgcctcagcctcccaagtagctgggattatgggcatgcgccaccatacccggctaatttttgtatttttagtagatgcgatgtttcaccatgttggccaggctggtctcgaaatcctgacctcaggtgatcctcctgcctcagcctcccaaagtgctgggattacaggagtaagccaccatgcccggactcaatctttcttattcctaatattattttttctcattttccagttatacttgccagacaactctctataggtcattttattaattttgtctagagactatttaccacttaccaactgcacactcacatcttattttttccaatgaagaatgtgctgttcaagtatattttttttctagatttttactgtgacaaacaatgcttcaacaaacaccttttacatttatcttggatccatgtgttttttaaaatcacaataagacagtccctcaaatagtactgctagttcaaaagtgtgcatattttaactttaacttttactacacatttttcaaactattttccccaatctatagcaactcacactcaaaggaacaaagtcggagaatggcttatcttcactagttatgaatgttaccgtctttttaactttgtgctaatctattgggtaaaaaaataggttattattctttctttaatttgtattcactgcttttttattgcagtaagaacacttgagatttagctttttaactaattaagtacacaataccatgttgttaagtgtaaacattgtgttgtacagcaggtctctagacaaatacatctttgataaatgattctgttaaaccatgtttctgttcacatagttctagcttcccccttaggaaaaggattgcctccccccacccccatcccccatatttacttttccacgttattttttagctctttgcttctttctctttgcaatctcagaaatttatcaggtttattctcaatatcatggaatccattttcctctgtgtcaattatagtctttattttgtctaatgtttttttcattcaattactaagctcttagcttccttgtaatccttccatatctcatctgtattcttttcaaattgatatcctttactttagaagccatatttattgcatcctattaggaatgctgacctgctttctagaatttatgtatgtatcttggaggaaatgttttccacaaatatcaaagaatggtgtccctttttccctgttctgcaataatatttcccaggcctcactggttgttttcattttagtcacccagatcctgattttattgacaggacatgtagcttgcctgtgtcttgctccaccatgacttgaaacttttttcctatgtatagctggagggcaagacagcatgacaactaacaacccatcctaggaccagcagcaaccacctcacacaggcctgagaaaggggcttggaatcttctgcccatgccccagtccagttttctgactctgtcaaccaatgaaggataagagaatccatgccagagcatctcccaggcctctctctgcctctgctccagttctggggcctcacttttcagtccgagatatccacagccttgaggggctgtcaggtggttgccaaggaaccgaccggcaggctgtgcctccagggacctcacttggcaatgttcattacccctgctggtcctcagccttgcaagcctatattttatactgattttatcagcaccctgacaggggatccatctctcgagggaggactcgcattaataaagcttatgagactgctacatgaaaccagatgctggattattaacttacaagaagaaataagtgatgcaagatggaaaatttgaagtccacagcagtcatgccttttatttttgatagctgagttagtaatacgagaagctaaaccatcatcccaattcctatctgtgaatttgcagtgaaagtcactgccatagaaaccaaagtactcaaggcaaatgctctctttataggcagacctacctaggaagccaaatagtcaaagagtatttttgggtttggggtttcttcttggttttttttttttgtttttttttttttgagatggagtctcgctctgtcaccctggctggagtgcagtggtgtgatcttggctcactgcaacctccgcctcctgggttaagtgactcccctgcctcagcctcctgaatagctgggattacaggtgcctgccaccacgcccagctaagtattgtatttttagtagagacagggtttgaccatgttggccaggctggtcttgaactcctgccctcaggtgatccacctgcctcgatctcccaaagtgctgagattacaggcgtgagcaaccgtccccagcctgtatttgtttttagtagagacagggtttcactatgttagccaggctggtttcgaactcatgacctcaagtgatccacccacctcagcctcccaaaaagctgggattacaggcatgagccaccacgcccagcccaaagagtatttttgaacacagtctcagagctagggagggcggatgaagcaatgagactgggctgcccagtgtctgttttctgccaatcaccatatccttcctatctttgccactgttatcaaccagtctgctgatgggcttctcctctcttttgcatctgggaccatctccctcttctgacagctggttcccttctttatacaatcattcaatcaggagatggtcaaaactatatctggaaaaccaggtctggaagcctgtctgattccttcacaaaatttttcccgttttgatggatggtggctcacacctgaaatcctaacactttgggaggctgaaagcaggcggatcacttgagcccaggagtttgagaccagcctgggccgcatggtgagaccctgtctctacaaaaaataaaaaaaattagccgaatgtggtggctactcaggaggctgaggcaggaagatcacttgagcccaggaggtcaaggctgcagtgagccatgtttgcgccacctgcactcggcctgggcagcagagtgagaccatgtctgaaaagaaacgtttccctttcatcttctgctgactttattttttgccccttcttttcacaggtgcggactttagtgactttacaggggaatatctcatgtcctccatgaacaagttctgaggagaccttttaataataggaaccgggccaggcacagtggctcaagtttgtaatcccaacactttgggaggtcgaggcgggcagatcacttgagatcaggagttcaaggcctgcctggccaacatggtgaaacccatctctactaaaaatagaaaaattggccaggcgtggtggtgcgtgcttgtaatcccagctactcaggaggctgaggcaggagaatagcttgaaccccggaggtggaggttgcagtgaaccgagattgcgctactgcactccagcctgggcaacagagtgagactccatctcaaaataacaataataataataatgggaactgatcttaggatctgctctctactacctcttatgctttctatgagtatttctacctcagctttctatgagtatctgttttattccaaatggatttgtttccacaatgtggggctggtggagagcagtcccttggagagttgacaaaacaacacccagccatagaaagacggctgatcaggtttctgtttggtacatagtctgggtgtctagctgggaacagatcacaggagggggcaacatgcctttctgactcttttcagaaaagcgaggctgttgttcccccaggagaagaatgttcagctatgggttgagatctccttatcagttgcaccacccctgcaattttgcgacagttcctatcagagagaggcacttggctgtctgccagacgtgggtctgagagtagccagagttccttctacctttgaatttttgttttaagttgaagaaagtcatatcagaggttgctaactcaatcggaccctccaaatcagaaatcgtacagagaatttctcactttatctacaaactgtccaaaccagaaattttatcagcacagtaaggggtggccctcacttgtctctcactccaggcctgacgttggggaagtaaaggtttgaacacctgcctctggcagcctgggctcaaggacagcaggagctggggactgcaagacagcagcttcacccatgctgactcatgctgacctgtcggcctcctcgtgcccctcatcatgcccctttgtgctccaggttgacatgttaaggaactgagagttttacgtcttttatttcagaaatgggtcaaatttaagagagactttgataatttcaagactcaatgtatcccctgggaaatgaagatcaaggacattgaaagtgagtatgctggtgtcactgtttttttaattggtttcctaaagcgtttcccaagagcttggattgtttccttggccctctgaatagattatttcattggttctgttgtattaggaaaaaagaatgagttttgaacttgtcaggccaagatttattttttatttatttatttatttatttatttatttatttatttatttttatttatttttgagacagagtctcgctctgttgcccaggctggagtgcagtggtgtgatcttggctcactgcaaccttcacctcctaggttcaagcgattcttctgtctcaacctcctgagtagctgggattacaggtctgggccaccacacctggctaatttttttgtatatttaatagagacagggtttcatcatgttggccaggctggtctcgaactcctgacctcaagtgatccacccaccttagcctcccaaagtgctgggattacagacgtgagccaccgcactcatcccagaccaagatttaaattctgctttttcactttctgactgtgggcacttaggcaagttagttaaccccaaagagcctcaggttatttatccaggaaaagaaagggagatccaggtgtcattcaacagactgatgtgaaaattgaatccaccacacacataaagtgctcaatagtgtccattttttccttctgcagcactcatacccaccgtcttttctctctctaggtcactttggttcttcagtggcatcgtatttcatctttctccgatggatgtatggagttaaccttgtcctttttggcttaatatttggtctagtcataatcccagaggtaagaaaagaacttcctaaatctttggatagagttaaggcttatgaccaccgtcatcaattatcaaccaaatacttcctgttttacaaagaatcagtcattcatttaaaatgctattaggctggtgcaaaagtaattgttttgcattaaaagtaattttaattttttgccattaaaagtaatttataaattactgccatgaaaagtaaatttataaaattaaaagtaatggcaaaaactacaattacttttgcaccaacctacgacctaatgtactcacatcaattacccagatagttaaatacaaagaatggaaccaaaatactttgttccttaattagtaggtgaatcttacatttttctacttctcattttaccttaagatcagtggagaattaatgtttcaatgagtttttttcttttactctcagaaaaaagagagggatagaatacattatatcattatttatcaccaaaaaaacttggatttgactatcactcctcactattctcccatatataatttttaaggaggttttttttagaaacagggtctcactctgttgcccaggttggagggcagtgatgtgatcgtggttcagtgcagccttgaactcctgggctcaagtagctctcccacctcagcctcccaaagtgttgggattacaggcataacccaccatacctggccccagatataatcttattatggacataaatagattcttatctacagatgattaattgagaaacaaaaaaggggtaatgagcaatttgtgcaaagtcacacaataagatcattgtgaattggatctcaggtccccagagtgatggcttagggtcttttccaaggagcctgtggctcactaagcactgagcacagcaattgctacaattgctacagtcctgactgaaatccttgatgctggtgctgggtacacaagtgggtctacttcaacagctttcagaggaacagtatgtgtgcatttagtattttcttcctcacaggtgtattaattggttctttgatgacttactgactcctattttgttataaatggttctgtgagcatattggagtcaattctatctgcagttacattttctgcacagccactttcaggacattaaaaacctttcacataatgtgaattaaatcagatttattggaggaggttgaccatgcattataatagcctttggtagcaaaggagtgttacattattcataaaattgttgaattcttttctatattactcaaaatgtgtgcttacaaatatgtcattaactagcctttgtactctttcataaacacacctagaaatcaagggttctgagtccactgagccctacatatattcttatgccaatatcactctctgacccagaagttagcattttaaacgtcactgtcaagcgtacacaaacactcttacaccaagtctggttctccccagggggaaaatattgtcaaaagctaataggaagtctcatttatctcctccatagtcaggtaaatatgaaatgttttcctcggtagtcaatggggaaatttaccttcacaaagctcttggctttcttcttggaagcttttattccatgagaagagagcacatttaaatgccacaggcctatgagacatctctgaaattttgctgtgcagtggtccataaaaggcaggtttgggggaagttgagcaattttaaggacactcggttgctttttaaaagagaacattaaatttggtataatttatgtaagtttttaatatttttatgagggaacatttattttaaacaataaaaacttagtgattggtgcattccaatgaagcagccaagatctgaaccattcgtgctagagaaccttgatttgattggcaggtgattgggaaaaccatactggagtgggttgagagtaagagagagagagagatgctttgctggaaagaggagccttggcttgggaagaaggagaagggaagaagggaaataggggagaagggaagaggcttagaccaggtagcagcctgttgcagtaggtcagtgctagatccgggtaatatcaatgggaatggattaaaagagaggaatcagagtgaagtgcacggacaagtcttgatgacaggttggataacagcaattagggtgtggggtgtctcaagatgccttcttatttaggatgatgggaaattggccatatgggaatcagacacatccaaattcattgcacatctaaaggaagtgtcctgttggtcaaagacacagagaacttcagggctcaagggttttcagcataagctaaggttcagagatatccccacgacccatggatgttttaaaatgaagcatagtgaaccagagggtccagggataagaatagtagaagtgctcaaacatgactttttaaaaaaattatttatatatatatagagagagagacagagcctcattctatctcctgggttggagtgcagtggcacagtcttggctcgctgcagcctccacctcctgggttccagcaattctcgtgcctcagcctcccaagtagctgggattacaggcacgcaccaccagacccggctagtttttgtatttttagtagagatggggtttcgccatgttggccaggctggtctcaaactcctgaccttaagcgatctgctcgcctcagcctcccaaagtgttgggattacaggcatgagccaccatccctggccttgaacgcaactttaacgaaacttctccttatattcattttccttttgccacaaactctcaataccactttatgaaattaaacagctctgaatgtaagaatgagccttgtttatctttaattgccattgcctgcacaacccaggatgtctacgtgatccctgaggaaccctcagttatgctgcaggagctggctggcaaggccccactggatgacaagtttatgtacttctcttccaacactggatgtatgtgaaaatcacctgggggactttaagaacaccagatcttaggctcacccccagtcaaataaatttgactctgagggtatggtcttgttatctctgttttaaaagcttctgtggaaagcagatttctatgataacctccaatgatccttctctcctggtattcatgtccttatgtaacgcctccctttgaatataggctagacctagagacttgcttttaacaaatagaatatagaatggttaggttatgaaagatagtgatttccatcttgctggcagaattctctgttgattcccttcttggtttgggtgctttaatgaagcagtctgacagattggagatgcccacctggcaaggaactgagtgtggcctttggacaatggccagcaaggaactgaggcccttagtccagcaacccagcaacaaccacataagcactttttttttttttttttgagatggagtcttgctctgtcacccaggctgaagtgcagtggcatgatctcagctcactgcaacctctgccacccaggttcaagcaattctcctgcctcagcctcctgagtagctgggattacaggcatgtgccgccacgccctgctaatttttgtatttttagtagagacgggatttcagcatcttggcctggctggtcttgaatcctgacctcatgatccacctgtcttagcctcccaaagtgctgggattacaggcatgagccaccatgctcagcctcacataagcacattttaaggcagattcttccccagtcaaaccttcaaataagaccaaagcagaaattttggttgcagccttgtgaaagatcctggaagcgaaggacccagctaagccatacccaaaatgctagtcacagaaacagtgagataataattgtgtgtttttttaagcctctaacattttagggtaatttgttatatagcagtagatgactaatgcagctccccaggtgattctattatgcagctagggttgaaaactgctaatgtacattataaggtctttaaggaagctgtgctttaggtttacatagcaagcattcagtctgtaaacctcttatgatacttccccttaaaaataactactaaattatttcagacatatgaaaagatataatgaggccgggcgcggtggctcacgcctgtaatcccagcactttgggaggccgaggcgggcggatcacgaggtcaggagatcgagaccatcccggctaacacggtgaaaccccgtctctactaaaaatacaaaaaattagccgggcgtagtggcgggtgcctgtggtcccagctacttgggaggctgaggcaggagaatggcgtgaacccgggaggcggagcttgcagtgagccgagatcccgccactgcactccagcctgggcgacagagcgagactccgtctcaaaaaaaaaaaaaaaaagaaaagatataatgaatgagcctacttgctcatcaccatgcctaaaaaatgaaatattacacacacactgaagtcctctgattaattttccccaattttattacctacgtaaccctcactatcctgaactttccatttcaactcacattttaaaatgtagtgacttaaatacagtcatctcttattttctaaaatcacagtgtatctaaagatgtatccccttttgcattacagtataatttttttgtctcatttacagcaaagtttgtcttttttagttattttgttcaagaaaaaacttttggctttgctgattctctctgaaatgtctttttttttttaattcagtcttttggggggcacaatttgcatcaagtaaaatttactccttttaggtatacaattcaatgacttttgacaaatgtatgatcaggtaaccaccacacaactgaaatatagaacatttccatcgccccctaaatttctctagtacccacattgcaagcaatctcctctcccagctcccagcccttgacaaccaatgattgatttctgatttctgttcccaaagttttgcccttttcagaatatcatacaaatagaaatatgtagtatgcagttttattgtgtctaacctctttcagttggtacaatgtctttgaaattctttcatgtagtttatcagtcatttgtccctttattgctgaaatggaattgaaaattacaatgggattgtaatattccaccatatgagtatatcatagtttgttatccattcaccagctcatggacatttcagttgtttctatttggaaactattatgaataactctactataaaacattcactttcaggtctttttcttttatatctttatttttatattactaatttctaacttatatgtttcatttctttccttctaatttcttggggtttgtattcattatctattgctgggtaacaaattactccctattttttcgctgaatacaacaaccatttattattatttctgtgggtcaggaatccagaagtggttctggcttggggtctcccacagcctacggtctaggttttgaccaaggctacaattatcttgaggctgaactgaagaagatccgcttccaagctcactcacatggctactggcagatctcagaagatacaatttcaagcttactcacgtggcttctggcaggcctcagaaaatctgcttccaaccttacttatgtggctgttcccaaggttcaggtactcagtggctattggccagagacatcagtttcttactacatgagtttttccataggcaagctcataaggtggcagctttcttctcccagaaggagagaatccaagaaggaaatagagcaaaaagaagcttcccacatagaagccaccattttttataacctaatctcagaaatgacattccatcacttctgccatattttattccttagtagtgagtcactaaatcaagcccacactcagtgggagggtattatggtacacaataataaataccagaggcagggatcatgtgagccacctcacaggctgcctaccacattgaaccctctggtcctcagtgattcacatcccttccacatgcagaatacactcgcccctcctcaaggcctctaaaaatcttattctggcatagcatcagctcagattccaaactctcactctaaatcagtagttcaggtgcagatgaagctccatgggggtagctctttaaatacaactccttgagttcagttctctttaccatgagactaaaaagatgttatctgcaccaacacaacaaacataaaatggtgggacaggcataagataaatgctatagacatgcctgtgttcaaacaggagaaaaatgggaggcacaaaggagttattggcccatagcaagtctacaactgtagtagcctgttcttgtgttgctatgaagaaatacctgaggctgggtaatttataaagaaaagaggtttaattggctcatggttctccaggctgtacagaaagcaaagtgccagcatctgcttctgttaagggcctcaggaaacttacatcatgatggaaggtgaaggggaaccagcacatcacttggcgagagcaggagcaagagagtgattgggagaggtcctagacttgtaaacaaccatatctcgtgtgaactaaccgagtgagaactcacttatcaccaaggggatagtgctaagccatttatgaagaatctgccctcgtgatccagtatgtcccaccaggccccacctccaacactgggaatcacatttcaacatgagagttggaagggacattcaaatgacatcagtaacacaacactcatttataaattttcctctcaataccattttagttgcatgccatatactttgatatacattgccattatttatttttaggtattttctaatttccttgtaatccacaagttatttatgaataattttcaagactttaatatatagaaagattggtggcattttttactggtttttagtataattttatagtgatcatagtgtatattttgtatgaaactgatactttttcatcacttgggacttgctttatttacttagaatatggttaattttcctaaatttttatattatttgcatggttcaaaatattacttgtattctacaaattatctataatcttactaattttagagtagcatgatcaattgctgagtgagatcaattaaatctcctgccattgtcttcttctcattgtaattattatttttgttttatatatgttaatgccatgttattgggcacatacaaatttaagattgttatgtggtgaattatattgatttattttcaaatgttaaaccagattgcattcttggaataaacccaactaggttattatgtattatcttttttatatatcatctgattttgatttgtgaatattttatctagaatttttgcatctatttttgagatactggactgtaaatatccttcttataatgttcttatgtttggggatcactattagacctcataaagtgatttgggaatgtttttttttattattctcttgaagaatttgtgtaaattttcctgtggtaggtttaggtgaatttttaaaaatgtacttcttttaattgacaaatataaattgcatatatttatgttgtacaaaatgctgtcttggaatgtgtatatattgtggaatggttaaatcaagctaattaacatatgcatcacctcatatacctatacttatcatttatttttggtgagaacacttaaaatctattctcatagcaattttccagtatacaatacattgttattaactatagtcaccatgtcgtacaatagatctcttgaatttatacttcctatctagctgaaattttgtatcctttgaccaacatttcccaatctccccaattccctaagtgaagtttttgttgtcattgttgatttgttgctttttgtatatgtggtaggcagaattctaagaatgaccctaaatgaccctcaatcttgtataatcccccccccctttgagtatggacagaacctaggaatgaggtatcactccaaggttatttgagtgagcctaatttaatcacatgagctctttaaaagccaagagttttctctggctggttgcagaagaagtcacagatattcaaaacatgggaaggattgaacacaccactgctggcttaaagatggagggaaccatgtaatggggaatgtgggagcccttgagaggctgagtgtggccgccatctgccaccccgcaaggaaacagggacctcagtcctacaagcacaaggaaatgaattctgccaacaataagtgagcttggaagaggactccagaccccagatgagacccttagcccctgctgactctttgatttcagtctggtgagaccctgagcagagaatccagccacaccatgctagactgctgacctacagaactgtgagctaataaatggtgttgctttaggccatctttgtggtaatttgttacacagaaatagaaatccaaagcagtagatatccagctttggatctgtagcacttactaaatcttaaactgtcttttgtcacattgggaaaattctctgccataatccctttaaatactgtttctatgccattccatcttctctctccttctgggactacatatatgtgtgtgcctttgcatgtgtctttgtgtgtgtgtgtgtgtgtgtgtgtgtgtgtcttgtctcagtgagccttgtctctgtatttccatgtatgccttatgctcttttcagtatcttccatctttttctctatatatttaagtctggacttttttaaccctgtattaaaatttagccattctcttttctgatctatatgttcttaaatctgtccattgagcttttaatttcgatgatcacatgcttcagttctataacttccatttgattgtttttatagtttccagttctctaccaaaatgattcatcttgtcccttaattccttaagcatattaatcaaacttattttaaagctcatgactgacaactcccttatttagacttcctttgaatctgtttttattgtttaatttttcttttagtttttagtcaagctgagtgctacgcattgtttgtgagcaattattgagttttacttattcctctggtgggagaactaagcaagatggtctatatttttgtctaattttactttctgagtaaaatcttcccaggcctcaactaaaagcttgggctttttccagatatcttcctatttgccctgtgtgtgtgtgtgtgtgtgtgtgtgtgtgtgtgtgtgtgtgtgtgtgtgtgtggagatggggtttttccatgttgccccggctggtcttgaactcctgagctcaagcgatccacctgcctcaacctcccaaacctatttgtccttaaatttcactctcatttcattcttcagccctttgactattccaaagttgctgcatactgtctttatcttttagctgctgtgattgaaatcaacgaataactcatggggaacagcaatgcacaatcacttcttcagaatttctttatctcctggatcttggcagcacaagtcatgattgtccacttgtctagttgttctcagtgaaagagtttgtccaaagcaacttcccctgcttttgctggcagtactgtttgtttgttaatttgtttttgagacaaagtctccctctgtctcccaggctggagtgcagtggctcaatctcggctcactgcaagctccgcctcccaggttcacgccattctcctgcctcagcctcccaagtagctgggactacaggcgcccgccaccatgcccggctaattttttgtatttttagtagacacagggtttcaccgtgttagccaggatggtctcgatcttctgacctcatgatctgcccacctcggcttcccaaagtgctgggattacaggcatgagccaccgcgcatggccggcagtattgtttttaatagtaaaatctggaaacaatccaaatgtctatgaagagtagactgtgtaaatacattatagtatgtccatacaatgcaatattacgtaacagtgaaaattagagaactgtagctacaaatgtcaatatcaatgaatctcaaaagtgtaatgttgtatgaaaaaaacaattcataggagaatacttatgcatgattccattttacaggcaaaactaaacaggcaaaacaaaacaataaatgagtaaaatataaggaaaaacaagggaattgttaacataaaatgtactatatcttggttgcatcttaggatgcaagagggatataattcaggaggggcttatccagggtactataaaggcctggaaatttcctgtttcttaagctagctagtggatatatagtagttaatttcctttttattatgatcaactatacatatatgttatacatatactattttatgtataacatattccccaataagaaaataaatttaaaacaaagaaacaaaaagaaataaaagaaaattacctaaaaatgaagaacctataaattaagaaacaaagtaattttatattaaatggtgaaaaatactaaagcctgttacaaaaatcaaaagaaacatgatatatccctatccctactacttttcaatattaatttctgccacctaatgcaatgtcaggaaaattaacatcttatacacttcgtacaaaaaaaatacaaagttattttggtttgcaggtgatatgattgtaaaccccccaaaaactccaatgattttatgaaaaactactagaatctaataaacaagtatattgagatgactggagtcattttaaagacaaatggcagtgattttctgtatatttaatgtccacttaaaaatagaatttaaaattttgacacaatgcaataaatttataaaataactagtaatacatttaataaatcagaatatttctatgaggaacactataaagaattactggacaaaaataagacaataaatggaaggatatattcttggaaggaaaaatttaatctcattaaaaagtcaatccttcctaaatcaatatataaatctaatccatttctgattttttttacaattaaggatatgaataagggcatatgtataagggtattaataacagaattatatacacgtatagaactagaaatactttaatgtccaacaatagaggatttgttaagtaagtttcttgtacatatttttattagatatttttgaagtcattttatttggggaaataccttatgacgtaggaaactggtcacaaaataatattagactaaataactagactaaaatatacatagaactcagaaataactaaaagaaaatatataaatatctaacagtcattatctttgggttttggcactgataggtaatttttaaaatgctcttctggctgggcacggtggctcatgcctgtaatcccagcactttgggaggccaaggtagtaggatcacttgagcccaagagtttgagaccagctgggcaacatggcaaaaccttgtctctactaaaaatacaaaaaattagctgggcgtgggggtacacacctgtagttcccgctactcaggaggctgaggtgggaggatcacgtgagccagggaggcagaagttattgcaatgagccgagatggagccactgcactccagcctaggtgatgaagtgagaacctgtctcaaaaaagaaagaaaagaaaagagaaaagagaagaaaagaaaagaaaagaaaaggaaaggaaaagaaaagaaacgctcttctgtactttttcacattttttacaatgagtgtgtgttactcttaaaatcaggaaagcgatcaatgttatttaaagaagaaaatagagccgggctcagtggttcacgcctgtaatcctggcactttgggaggccaaggtgggtggatcacctgaggtcaggggttcaagaccagcctggccaacatggtgaaatcctgtctctactaaaaatacaaaacagccaggcatgttggcaggcacctgtaatcccagctactcgggagactgaggcaggagaatcacttgaacctgggaggcggaggttacagtaagctgagactgtgctattgcactccagcctgggtgacaagagtgaaactccatctcaaaaaataaaaaatgaattaaattaataaatacataaagaaagaagaaaataggtgtattccgctctgagaaggaaagcatttaccccagtatatgaatgtctctgtgtgtttgtatttcctccactcatacttgtgtcattgtgtttctgcacaaggtactgatgggcatgccctatgggagtattcccagaaagacagtgcctcgggctgaggaagaaaaggccatggatttttctgtcctttgggattttgaggtactattgtcaacatgccaatgaacttccatttgtgattataaaggctaaagattgcatggataagtatgaaatagtgcgtttaattattgaaaaaccattgctttaataggatcccagcactaagctaaatgagcttgcaaaccatgtctctgcacagtcttcccgggtctccttcacgcactgctctctccagccacactctgacagatgtgggctccccatgcagccactgcacctctctgtctgccaggtctctgtaaggtgatctcacggtatgcttttctttcctcattcccacattaagaccccagatctatctccactccaggcttccccaagtttcacatgacatcttcaactgaatgtcctacttgctcttcaaatgcaacacctatccagccaaaacccacatctctttttcccagctcctttattggaatcaccattcatccaatcatccatgtctgaagcctgaaaatcatcccacgcttctacctcttcctcaccaaccacccgccactgccatccaaccaaccactaaatctgaacctacctactaaatatttcttaaatcttttgtaaacccaattgtattagttcatgttcacactactacctgagactgtgtcatttataaataaatgggtttaattggttcacagttccgcatggctggggaggcctcaagaaacttgcaatcacagtggaaggcaaaggggaagcaaggcacttcttacatggcagcagaagacagagagcacaggggaaatgccagaaacttatcagaacaaccagatctcaccagaactccctccctatcatgagaacagcatgggggaaactgtccccatgatccattcacctcccaccaggtccctccctcaacacctggggattacaattgaagatgagatttggctggggacacagagccaaaccatatcaccaattaagaaccttggcttttattccatttgggaatgagaatcaatgaatatctgaggaggaagaaaatcagtgaatatctggactgagtaagaaaaagccacggagtttttcatccttcaagatttcaaggtgctattgccaatgtaccaatgaacttccacttgtgattgtaaggcctaaagattgcgtgtgtaagtgtgaaacagtggacttgattattgaaaaaccagttctttaatcaaataggatcccatcattaggcaaaatgcgtttttccatctcttttaccttcactttgaataacgtcctccctttactggaactactgtcagaatcatctacctctcctccctgccttggcttggctcctaaaatttccattccctttgttgctggagtgatctttataaaatgcagatctgaccctgtcactcccctacctcaaattttcattgattctcattcccagtggaataaaatccagtgttcttaattgggtttacaaaggaactgttcatgacctggctgctccctacctctccagtaatacctcacactttagtgccccaatgccaccaagctttggggaagtccctgcacgcatcacacactgtcattgcctctctgcctttgcttatggccctctgcctgcagcactcttccctcctttgtgagcttcatactcccatgcctctggaggcttactctgcagctccaagggcttcctaaggctgggaggcatggctgtagtgctgcccacagcaagtcattgctgctgccatccttcactctcaaagtcagattggagacccttcagaaagttatttggaacaggggttcccaactatactgttactaaggattccttttttttttttttttttttgagacagagtctccctctgttgcccaggctggagtgcacgggcatgatctctgctcactgcaacctccacctcccaggttcaagtgattctcctgcctcagcctcccaagtagctgagattacaggcacctgctattacacctggcaaatttttgtatttttagtagagacaaggtttcactacgttagccaggttggtcttgaacccctggcctcaagtgatctgcctacttcagcctcccaaagtgctgggattacgggcgtgagccacagtgcccaaccccctatccctaatttgatcccaaatgttaacaacactctcttctccctcccatgtctccatgcactctatgtaatgaggaaatagagggaatgaaggagagaaagaaggggagatatggaggggctctggagccactggaggaggtgaagggaagaacaagaacatctggaactcttccttcggcccttagattcggttaagactctgagaaagaaatccctggtagagtagacatgtctggtaaccaccagctctgagcttaccaacccagagcatttggctttgctgtcccccagggctatatcaagtactctgcactcttctatggctactacaacaaccagaggaccatcgggtggctgaggtaccggctgcctatggcttactttatggtgggggtcagcgtgttcggctacagcctgattattgtcattcgatcgtaagtatgaccgtctcatccgcaggctttgacttcacagccacagctcactcccctggccactctatgcctacctcccttctggtggggcattcagagagaaaacaggaaatgagcacagaaagcatatgcacattataatttgtggtatgaaagacatgaaccaggccatgtgggatgtgctgggaaataggattgaaacccctttggatgaggctgagaacgccagccatgctgaaattctggggagcagcattttagacaaaagaagagcatgtgcaaaggccctgaggccgcaaatagcctagtgttttcccaaactgccaaaaggccagtgtggcttgagagggagcatagtacctagtaaggtaggcctggaggtttgtcaggcctgtttttgcttttgtccagagctcagcttcctccaaaaaactcttctgctcctccaaactctagcttgtgtgttagaaccaaggctggcatatagaaagatacaaccaaataaacttatactaaataaatatatgtggcagtgattaaccatggcggcctctctggccccaactctacttgtctctgtggtcagaagtggccttttaatatgtctgtaactcttaattcctattctctgaaaacttggcccagcccatggattgatcgccttcttcagaatcaggggaccccatcagctgtggctgggggtcacggagtggaaggcactgtctcctacacaaacctatccacctgggcccactctcccttcagcacagacatgaggggtcacagcctcccagaagagggtggctgtgtctccaggagaggagtggagcactgggtagagtgaagtctgggtacagcccctgaaagggcaatggggacgcttggttttctttcacatggtctcaggcggaaatgctgttgttcccaagaccctgcccagcactcgacagtgaccactgggtgatctctgactgcacagccctatcaggcaaaaggaaaagaacaaggagacaggcttgcttttattcttagccctcatgttgttgctttttccctgctctcaccccagataagtatagaaatatgcaaagttttcgtgacaaaccaaaaaagctaactaagccctgtggaacagcaaatccagagagccaacatgttagggaagatgacaaacccctcatagtatcttatagcacccctgtttggaattctgtgattcccacagggtcaaactctagggagcataggttgaagacaggtaggatgaaataggaaggtccaaggtgctttcagccaaacttgattaagagaaggatatatgacctgattgtattaggacggtgcaaaagtaattgatggttttgcaattaaaagtagtaccgggccgggcgtggtggctcacacctgtaatcccagcactttgggaggccgaggcaggcagatcacctgaggtcaggagttcgagaccagcctggccaacatggcaaaaccccatctctaccaaaaatacaaaaaattagccaggcgtcctggcaggtgtttgtaatcccagctactcgggaggctgagacaggagaattgcttaaacccgggaggtggaggctgcagtgagccaagatcaggccactgcactccagcctggacgacagagcgagactctgttaccaaaaaaaaaaaaaaaaagtagcacaacaaagtagcaccagccacctcagtgtgttttgcattttatatcagaaaaaaatatatatgtgtgtgtgtgtgtgtgtgtgtgtgtatgtgtgtgtgtgttctatccaagaaaatagatgacttagaaggggacgttcctgtttgagaatagactcccgtatagagttctcaaactgcatttgcagatgagtcaagccacaggaaatcgggtgtagggaagaaaacatggtcacgtgtcttgtctcctgcaggctttttattacctcattgataccatgtgtgctttcaggggactctgaatttggggggaagggtgtcctggctatcctcaaagctgtcttggctcaagtccctgcctggcttgttttgtcactgaatgtcagctacctgtttatctgttacctgtgtccgagactggctaggccaaggttccctgggggtgacacagcagaaagagggcagacgtcacaacagtgctgtgtgccctacaggatggccagcaatacccaaggaagcacaggcgaaggggagagtgacaacttcacattcagcttcaagatgttcaccagctgggactacctgatcgggaattcagagacagctgataacaaatatgcatccatcaccaccagcttcaaggtagtcaccccagggcagttcccacttccggagaactctaggtccctctggtcattgagagacttctcccagctgggacatagaaaataaggtcctcaaataatttgtggcaagagccttcccagaaatgtgagcccagttttcaaacccttaagtaagaatgttcgtggctggtgcccactgtctgtttcttttcttttctttttgagacagcatctctctcccattgcccaggctggagtgcagtggtgtgctctcagcacactacaacctctgcctcctgggctcaagcgatcctcctgcctcagcctcccgagtagctgggactacaggtgcctgccactatgcccagctaatttttttttttttttgtatttttagtagagatggggttttaccatgttggtcaggctggtcttgaactgctgacctcaagtgatctgccctcctgcacctcccaaagtgctgggattacagacatgagccaccacgcccagcctgtctgtttcttaatatgacagagtatcctggatgctgagacctggtgctgcctgtttctacgtgaaacacatttctgctggaataagtggaaggactcatttggggaaagcatttctcaactttttctgcatactagaatcacctgaggagcttaaaagatctcctgggatccactaacagagactctgatataactggcctggagtagggtcctgacattggtttttcaaaagctccccaagtgattagaatactcagaaagagctgagaaccctggtttggggctgtgggaataaagaaatcaacactgatggctgcgccaaaatctcagaaatcaccactgaagaacttattcatgtaaccaaacaccacctgttccccagaaagctagtgaaatgaaaaaaaaaaaaaagaatttgaacttggtagttggaaaataacaaagagagagaaagggagacagagtgaaagcttggtgacagaaggctagcaatatggtctgtgcagatcagtcccacaggggctgaggtgggcaaacctttgcacgtgtgtaggattctgactgagagggttccttcacagaccttgcctctactttatttatttatttatttatttatttatttatttattgagacagagtgtcgctctgtcacccagggtggagtgtagtggcaaaatctcagctcactgcaacctccggctcctgggttcaagtgattctcctgcttcagcctcttgagtagctgggattacaggtgcacatcaccatgcccggctaatttttttgtatttttagtagagacatggtttcaccaggccagtctcaaactcctgacctcaagtgatctgcccgcctcggcctcccaaagtgctgggattacaagcatgagccactgtgcccagcccatgtctctactttaaaatcaccatttattttctaaacaagagtttttttcatgtgaagtgctgctgacaaagtttccatcattttccagtgagactgggtgttgtttatttatgtgactggtataaaaacaggcatggggggttctgaaaacaaaacaaaacaaatcaaaacacagttccatgagataaaaaaagagacagaaagtttcctgtgtgtacatgtccaaaaaaaaggtacaacaaagcagaaaaacccttctgagggtgcataataaacaaaggactattttagggttctaagttgcagttggagtgtatgtataattgagtggttgggtttgcatatttaaaaaataaaaagtatttttagtagagatggggtttcaccattttggccaggctgatcttgaactcctgacctcaaatgatccacctgccaatcccagctactcgggaggctgaggcaggagaatctcttgaatccaaaagacagaagttgcggagagccaagatcgcaccacggcattccagcctgagtgacagagtgagactctggctcaaaatgaatgaatgaatgggataatgttaaaaaaaaaaaaaaaaaaaagatgaaatcaaccctatgtttctttcaatccacacacaaataatttctttacaagagaggtttgaggaggtctacagaactatagctcatataaaataaccatccagctgggaagcaaatgaatgaaggccaaagctgtaatgctgaagcattgtacattgtactttgcccccgtgattgtaaaaaccattccaagttcttcgttttttttttctttaattacatttttttttttttttttttttttggagacaaggtctcactctggctggagtgccatgcccagttaaatttttctattttttgtagagatgaagtctctcactatgttgcccaggctggtctcaaattcctggcctcaagccatcctccctccctggcctcccaaagcactgggattacaggtgtgagccactgcacccagctcccattccaagttctttatggctcaatatttctcctgtctgatcagtgaagctttctttcccccaggacctagcaaagctcacattacactacaactgcgcttcgttctcttttctttgcccctcccctctcttgaattccttcctgctgtccactgactgatgcctgcagatggcagggacacccactaggaaaagggcttgagctcagcaactcacagcatgggtttcccagccctagagcccggtgggctttgcagtgcatggagcagggagctgactctgtctcctctccttctccttcttacagcaatggggggcttatggccacttccatccaaagccagggtaggggtgactgggggctttgacttttcctccaggattgtgagagagggacaaagaagatcaatgtctttgaaacactttgaacatgtgagaagtaaaatgacttcttttgtaagtttattaaaagagacataatatacttgtataacagaatagatgtgaaaattctgtgaattaagactttggggtctgggagagctcatttttcatcctggttctaccaattactctgtgtctagggcacaagtttaataatcaaaaatcaatttttatatactaacagaaaacaattcgaaaataagtttaaggccaggcacagtggctcatgcctgtaatcccagcactttgggaggctgagacaggtggatcacctgaggtcaggagtttgagatcagcctggacaacatggggaaaccctgcctctactaaagatacaaaaattagccgggtgtggctgggtgtggtggctcacgcctgtaatcccagaactttgggacgctgaggcgggcagatcacgaggtcaagagatcgagaccatcctggctaatacagtgaaaccctgtctctactaaaaatacaaaaaaaattagccgggcatggtggcgggtgcctgtagttccagctacttgggaggctgaggcaggagaatggcgtgaacctgggaggcggagcttgcagtgagccgagattgtgccactgcactccaggctgggtgacagagcaagactcggtctcaaaaaaaaaaaaatttagccgggtgtggtggtgggcacctgtaatcccagctactcaggaggctgaggcaggagaatcacttgaacttaggaggcggaggttgcagtgagccgagatcatgccactgcactccagcctaggcgacgcagcaagactgtctcagaaaaaaaaaaaaaaaaaaagaaaaaaaagtttaagttctattaatagtatccaaaaaaaacccataaaattcctagacataaatttaaccaaaataatgtacaagaccattacaccaaaagtataaaatattgccgaaagaaattaagaaaccctaatggagagatatgctatgctgatggattagaacagaggttggcaaactatggcccacaggccaaatccagcctgctgcctacttttacaaataatgttttatcgaaacaaaggcattccaatttatttacatcttgtctatggttgctttcatgccacaatggcatagctgagtggttgtgagagagaccatatgaccagcaaaccaaaaatactatctagctttttatagaatgagtttgccaaccctcgattagaagactcaatattttaagattcagttggaatctatttgacctatagacttaacatgatcccaatcagttactgaaatctctctgggccttggggtctgtaatgtgggtaataacagtaactattctactggtgtgttgctgggattaagagggacaatgcagccaggcacagtggctcatgcctgtaatcccagcagtttgggaggctgaggcaggcagatcacctaaggtcaggagatcgagaccagcctgaccaacatggagaaaccccatctctactaaagatataaaattagccaggcgtggtggtgcatgcctgtaatcccagctactcgggaggctgaggcaggagaatcacttgaacccaggaggtggtgagccgagattgcaccattgcaccccagcctgagcaacaagagcaaaactctgtctcaaaaaagaaaaaaagagggacaatgcacggaaagtaccacgtctgacacatggtgactatttaagaaatctaagtgtttcttacatgtactggaatagcaataacaacaaacatatttttctaaagaaaataattatccatagggcacagggcattacatcatctcctctgtattatttcatttctggaaatatagaaagtactattttcagggacccaacagccatggttctggcatttctggcctgacatttatgcacatctcattttcacacattaaggaatcaatagtggatgaacaagagagtaacaaagaagaaaatatccatctgacaagatttcttcgtgtcctggccaactttctcatcatctgctgtttgtgtggaagtgggtacctcatttactttgtggttaagcgatctcagcaattctccaaaatgcagaatgtcagctggtatgaaaggaatgaggtaagaaaaacatcgctgatgaactgaaggttgatggcaaatactgaaatcactggttcctatgccattcatttcatttatcgaaagtctggattataggcttgttttaataagtgaaattacatccccttccagtcaaatagcatgaatatcctgaagaaaaagtcacctattattaggttttgggaactggcttttacaactagaaaaactggattagcaactggatagccacctgtgcaacaccaattactaacgaggcgatcctttcctcacagctttgcagcgccatacatcgtaaatcaagtgtctattaatgcatgggtatgattctgggctctcttttctattcctgtttgtctattcctgcacaaataacaaactgatatactatgcatttacactatgtcttaatatctgatagagcgagttttctcatcaagctccacaataaaacacattaaggttttattgtgataacacagaatccataaacctctttcgggaatttgacatctgtggtcgtttgtgaaaatggctacaaattcttcctatccttgtatgcacatccctttgctttcctttgcacattcacgaagaggtggaatctgtgtcctccatcttttgaatccaccttagcttggtcatgtgacttggtttagccaatggaacaatagcaaccatgaaacatgcagagatttgaatagtgcttgtgtattgagacttgctcttttactgcttttgggaaccctgagaccttcgtcatgtgaataatctctggctagcctcctgaatgatgagacacatggtccagttatctccccaccctggccaatagccagtaaaccaccagatatttgaatggagccatcagctatcagcaggtaaggccaacaaaagaacgacccagttaagcccagtttaaaaaaaaaaaaaatgctgccccacagaatcatgagctaaataaattaataataagaaagagtttatcttgcattcaaacagcaatttaaaaaaagaagacagcctatcttcccccaacaaagcaagaaaggatataaaaaaggaaatatggcattgataggaggacaaatataaagcacaaaatcagatttaagtctaaatatatcagtgattctaatagatgtaaatggatttgatgctacagtttgaggacaataataattagatcaaaaactgttaaagctatgtgctatttataattaacccatctaaaacatcaggacacagaaaggtttaaaataaaagaatgggccagtggtttctgctagtggtggcctaggttatttggatcaagtaattaattaaaagccctaaaaatgctcatttaaagaaaaagcataccttgaaaacactgaggatttgaaaacacagtgagagacccccaagaccaattttaagtgaaagcctgtgaccagaaatataaggggagtatcagtgccaagtcttatgctctgaaggcaaatgctgacttttcaaacacttgttcctgtgctctagttccatcccactagggccagtgtcttagcctatgttgtgttaattaggttcctgcagccttgatgtgctgactctgtcctaagttgggaagtttcacaatagccaactagcagttcttgaattcctgatttatttccaggccttcataccccatcagtcactccactaatgttcaacacacaggcagtaataagagggaggtaacaaaccacaacgatggctccggagaccaacacatcaacagatgagccaagtgggtccagaagtcattcaggcactggccagcagaagtgggcatcgctgtttctctcttgcagagcttccagcagccactgccaaaatcgggagaaggttccagagttcccatgggcagagcctccgaaggctttttgaacaaggccaggtcctggctgcttttatgatcctcccagatgggtctgttctctttatctcagccaacgtttcattctctaccagttaatttcaggaaataccaggcagcagcaggtgtttgcttatcacctcagtccattatatacatgcttatcactttgagagagggcggaacaatttcactatgggcttaatgctttttgacatgagtgactctattttgagacattaggatcacaaattatgatatatgagtttgctagggctgtgatattattatatatttcttattatatattggtctgctcccagtttctggcacacagcccctaaaacccttggaatctctaaagtgatcagtgtttttttttgtatgctagtaagatgactggttgctggaagctcctggataacctctgcatctgggctggctgccaggggaaccagccagtgattagaaaattggaactttcagccgtatcccgtcacctccagggaggggagaggggctgaggttgagttgatcactaatggccagtgatttaatcaatcatgactacataatgacgcctccataaaaacccaaagggcagagtttgaagagtgggcctggaagctccaagccccttgcccataccttaccctatgcatctcttccacctggccattcctgagttatatcctttgaaataaacagataatctagtaattaaattgttttcctgaatgatttgcttactctagcaaatgaccaaacccaagaaggggattgtgagaatctctgctttatagccaaatcgaacagaagttgccagtaacctggtgacctaatacttgtgattggcatccaaagtgggggcaggcttgtgggactgagcccttcacctgtggagtctgtgctcactctgattagtgtcttaattgaattgaattgaattttacgctacgcagctggtatcagaaaattggttggtatgggaaaaaatttggtgtcagaagtgtcaaatgtgtctgacacatttggtgtcagaagtgtcctggaagtaaagtgttgatagtatagaaggaaaaacatataggctgccacaacaaagtaccacagactgagtagcttaaacaacagaaatgtatttgctcaccgttctggaggctggaagtccgagatcaaggagttggcaggtttgctttcccctgaggcttgcaggtgtctgtcttctccctgtgtccttctgtgacctttcttctgtgcatgtgcatggagagagagagagagagatctctggtatcttttcctcttcttataagaacaccagtcttattggattaggtcccacccttgtgacctcacttaaccttaattacctccttaaaggccccatctccaaatagtcacattgagagttaggacttcaagatacaaatttgtgggaggaggaggagacacgattcaatccataaagtccaaagagacaaagtttccaaaccaggacttttccatattaggaggaggggaaaatctccctaaatagacctcaccacccctctcccaggagttaaggcattcaaggtatgggtgaacctgatctaaccctcctcccacctccagtaactactaagagggcagcttgctgtttaggctggaagtggaaaagagaaggaaaaggtgctgtccgcagagcctgtggcctcagaccttccactgagcagacttgtacctggggctgtcagaccttgactttggtttgaagcattgtagatggtagtgtaccaggtacctggcagaaccaagcttagagcctctctaattcagcatgtacatatctaggcctcagagaactccataaataattattaaagtcaatgaccagaaagaagtcaaaggttacctggtatacaagaaaacaaggcaaaatgatagacttgctctttttacctatatgccaagatttattttcctttttctttaaagtccattaactttacttaagaatacatcctggtattggtcattcttgatattctcaggtacacagtgtatttatttatttatttatttacttttgagatgaagtctcgctctgtcacccaggctggagtgcagtggcacgatcttggctcactgcaacctccacctcctgggttcaaacaattctcctgcctcagcctcctgagtaactgggattacaggcacgcatcaccatgcctggctaatttttgtatttttagtagagacagggtttcaccctgttggccaggctggtctcaaactcctgacctcaagtgatctgcctgcctcagcctcccaaagtgctgggattacaagtgtgagccaccataccagacccaaaagtttttaaaaatgttaggcagattcaaatcttgtttttcatttaagggaagatttattgaattataggtttttttaatttgttctattcccttttttgggttttcttctttaggacctcctattatacccgtgttgaatcttctttgtctctcttcaatatatcttgttttctcctgaatcctattaacttctttcttcatatattttttatttttaaaactttccccctttttatctttttcttgtcattgtcattatgttttgcaattgtgattctcttaggtattcttcaattttaatatagttttcccttaatttcttttttctttttttttttttttttttgcagtattctgtcaccctttttctgggtttttctaatttttatttatattgttttgtgacctatattttcttaacatctttcagttttctgtttttgaatactcattataattttttaactgttttatacaacttactttttggtgcgttttcattatctgaaagtttaacctacttcttgttctcttttccttgaaataactttgtatgggatttgacctagaaaaaacttttccactgttcatttttatataaagttagttttgctgaagttttagtgaggcatggttcaggatgactttcctaagttaacggagctctctcttccactgtttttatgaagtcttcaaaatatatggtggcttgctggatgagagagctcctgcctctcatcccttttctactttttatctagaccttcccattcctttatctatattccctctctctgctcaatttcaattctgttctcagaatagtctccttcatgttgtgccctgtcctgttagggagcttaactgacaaatttcaaaagttcaagaggcccaggctgttttagctcatctccagattaaccaagaatgaccttgcactcacctattattggaccgagcagagttcctcacagtgtcagctgctgttctcagattgttccactatgcttttcattgagtacctattagccattttgacatcctcctgttctcagattcattggataccccactgtttctcttgaccttctctcatccagacatgaactctgtaagtacttgtggctgttggtaatttgtattgtattgtagccacttgtatttaaggattcattaggacacctagcttcattgtctatgtgtttttttattttattatttaattgctttatccagttttacatggggattcgggagattcaaaaatcatgctgtgatggccaggtgcagtggctcacgcctgtaatcccagcactttgggaggccaaggcgggtggatcacctgaagtcaggagttcgagaccagcctggccaacatggtgaaacctcgtctctactaaatacaaaaaattagctgggcatggtggcgcatgcctgtagtcccagctacttgggaggctgaggcaggagaattgcttgaatcccagaggcggaggttgcagtgagccaagactgcgccattgcactccagcctgggtaacaagagcaaaactgtcttaaaaaaaaaaaaaagaaaaaaagaaattcatgctgtggctatcattatcttcccagaactccaagttattatttttagtatgaagatgcattcaccatgaaaaccatcattttctctcaggataaagtcctaaatggctttccctgacttaccttcccagttgtacccttatttttatttattattattattattattattattattattattattattatttgagatgaagtcttgctctgtcatccaggctggagtgcagtggcacgatttcagttcactgcaacctccgcctcccaggttcaagtgattctcttgcctcagtctcccaagtagctgggactacaggcacgcaccaccacacctggctaatttttgtatttttagtagagacgaggttttgccatgttggccaggctagtctcaaactcctgaacccaggtgatccacctgcctcagcctcccaaagtgctgggattacaggcatgacccactgcacctagcccccaattgtacctttagtcactcttactcttcccatcttcactaaactgcagcaccattggcctctgttctactgagatgccttctctcacacactctcatctctcttgaataatttcaggtatgagtttaaatgttatatccttatttctattatatacttaaagtatttaccctttgcagcatttttacctttgtaatgattaacttattatggaattatttacatctactttaagttcttgtgggcagagtgtgtgtgactttttatcctttgttgcatctttagaatttggcacagtgactcacacatagtaagtgcttaataaattagagatggaggaaagacaaaggagaaaactattaactgaatacctacaatagacctctatgcctattatttatgcctcatagcactatggcagggtaggcatccttagtcctagttttcacataaatatctgaggaccggaaagtttaagacacacagcttattagcaatggagtcaggattaggacccagtacctgtctggctctgagtctgttttgggggcctcattcctgattgcctaagcttacctctaacccactctggatcagtgcagttggacatcaactcagacactcccagcagtggattagaggccccagtgtagctcctgacctggtcagaatgggtttaagatatgggaaagacagggactttgggggcctctctgtaggatgggagaactgaggaatagagtaagaaaggaaaaacgtcccttccacaaagccttcactgggtcactaagctgtgagaaggactcaaaagatgcccaagatgaattctacccttaaggggattgcagtttccttaggatgcaggctcaacaagaataaaccaaagcacaaacaatagtaggcaggaataccgtgatcaaataagatgttttaggttacagatggaattgtccatgagagctgaagaggcagtggaattttgtggcaaaggcaggaattaggctgaacactacacaaacatataatgaagggcagtggtagatatggggcagtgatggctctccaggtgagaactacatggacaggtacggagatgatgagaaaccaagccaagggtcagtgtgagagagagtgggatagtcaagaccagccgagaagagttgaccaacttgcaatttgcagggatttactttccactgggtgagcagttgttttttgtttgtttttgtttttttgagatggagtcttgctctgtcacccaggctggagtgcagtggtgcaatctcgcctcactgtaacctccgcctccagggttcaagcaattctcctgcctcagcctcccaagtagctgggattacaggtacatgccaccacacccagctaattttttgtatttttagtagagacggggtttcaccatgttagccaggatctcctggctatctcctgacctcatgatctgcctgcctcggcttcccaaagtgctgggattacaggcgtgagccattgcgcctggccagaaagtgctattttcatcaatactagtaacaacaaccattatagcatctggtcacacagcaattatgatatgcaagcacaggccaagtgctcagggcatgttgatgcctttgccagggtcacacagcaagctgtgtagaccccagggcatctccaggcgcagcagagggggcagcagagaagtggagatggatggccatgggagtgcagagatggcagccaaacaagtataatgttgatgacacaacgtaggctttcctgattcctcaggtagagatcgtgatgtccctgcttggaatgttttgtccccctctgtttgaaaccatcgctgccctggagaattaccacccacgcactggactgaagtggcagctgggacgcatctttgcactcttcctggggaacctctacacatttctcttggccctgatggatgacgtccacctcaaggtaaaaaccacaacaccccccaccccactgcaattcctggtgcccatagtattttcttttttaatataataatttcattatatataattcatattaattaaataaatgtaaattaagaaaaataaaattaaaaaaaaactccttggactctatgacccaaagatgaccattgttaaccttttcctatagttttttactgtccttttctctggttgtcttttttcacatcatatacatgtcatttgataccttaatattttatcttcagccttttccacactgtttcagagctgccataaatgattaacagccaagtaattgtcctctaaggggctatgtcattacttaaccgtttatcaatgctcaccacacaattatggagcacccacaatggcaggccctggggtagagcagacaggaagacacagtcctgtcccaagtgtgttcacacactgggctgggagacagacttcattacagcacgctgtgggatgtgcttcagtagtggcaagcccagggcagcatggcagtgcacaggaggagctccagatccctccctggggaccttagcagacattggaaaaggcagagggaacagctgggtcaacagggaactggagtggagcagaagagtgaaaaatttagagcaaaggagggcccgatgatgctgatgcccctcttctccaccccttccctccttattattgagctgtaggaactttttcctgatgctaacagaaaactgttctaagcatggaagtgactgaatctggccctaacctctcctccccactcatctctggcttccctcctacccaggagactgctctaccctcctgagcctcacatttctgccacagggcaaaattctatcttgcctctctctccacccctctcctcatgtttgactagttgactaatccttcttgaggttttggcccagctgtcactgcctcccggaagtcttctgtggcccccattgtgtgatgtggatgctccttttcccagagagaatttctcacagctcgtatcagtctgttctgtaattgccagttcatctccatcatttactagactctaatctttctgagcgaacctccatctctcttggtcactcttgtatcaccactactttatatgcacagaagaagccctgaataaattattttcaagagaataatgaatgactggatagatgcatgaatggatggctgaatgcttagatggatgaatggatggatggatggatggatggatggatggatggatgggtgggtgggtgggtgggtggatggatggatggatggatggatggatggatggatggatgaatagacaagtggatggatggacagacggacagatgaatgctgacttagagtagaagataacttcatgggaaagacccaagaactacagcctctcctgtacatattgaaagcctgagaagggaattttggaaggactctgtccaggggagagcagaagctagatggtagggttgtggcatttgctggctttcactgttcttatggaaacagttggaccatccctagctccttcctaccccacacctccatcttctgttctagcttgctaatgaagagacaataaagaacatcactcactggactctgtttaactattacaactcttctggttggaacgagagtgtcccccgaccacccctgcaccctgcagatgtgccccggggttcttgctgggagacagctgtgggcattgtgagtagttacactctctaaaaaggtgacccctgttctcagttctttgttattccctccttgatgtttccatttgaggaataaccctgaaaacttaccagctgttcatccagcaaacatttcataatcatctaggaggaaataaaatgaccaaagcagatcctgtgacccctgggaactccaaatctctttggtgtctcaaaggttgtgattggtgtctggtagatattttcaatttttccaaaaacatagtaaattatgtctattctacaaatgcagagaaagctttgtccttcagtttttggtccttcttctatgtgcctctgtgcaaaacctgttttattttctctatatatcaaaaaaaagaaaaagaaaaagaaaaatctgactagcagaagatgaaaaaagctaggcattgtctccagtgactgacggtcacatttggtcttagtgggggcagctggcacttcagaataagtggggaagcaaggccttcgggtcctagtgatgatgactacgatgcattgggcatagtcaatttaacaggcaatttgcatttgcatacataattactaagtttcacaatagccttttgagattgatatcaatatcaacttcaagaggttcagagattattccaaagccatacaattggtaatgtggagctgggacctaaattaagcattttccagagccaggagtcgcctctcttcacacacaaaggatcagagggtcacagagacaaagtcaggtgggtgggggagagtttattagactctcaacaaactctcagggagggtgggagaagtgggcaaggtctccaaccaccccctcttcctgtgttcctctgcaggaattcatgaggctgacggtgtctgacatgctggtaacgtacatcaccatcctgctgggggacttcctacgggcttgttttgtgcggttcatgaactactgctggtgctgggacttggaggctggatttgtaggtcaccacttcatggacattccgcacaaaggaatttcaactatcttctttgatacttatagccagatgcattcttgggcatttcatttctttggaagcttaatgacggtctctgctctgtagagtagtaaagtgtttaatttgtatttcctttaagggtcctatttgccttcataagggaaactgctttttcccagtgtaatgaacaatgtgaccttctattctaggaaatggaggcatttggcctaggggaaagtggaccacacactccagtactgagccaatggttgatagggaattgcatctgagcagcctcaactctcattatgggggctgaaatctgacagtggaggcgaatatttcaggaagtcctggaacacaccaagaacacaataaccattggtcctgtcttctggatgatgctttgagaaacctcctttgacttgtattcccttatagccctcttccccacctacctggtaaatgtgtgtcatttcctctctgtagtgtccttctatgctctggcagaatctctggctcaggcacctgtgctgtacatgtctcttccacaacacctcactggcccagcctgcagtcactggtgtgcatgtaaggtacctacctcttacctgagctcctggtgaaaggctccgtaggatgttgacctatgtatccctcatcctggcctggcccaggtaagggccccagtacaggtttctgtcacattttttttcgttcagtcaccagtctcagttttaaacaagtctgctgagctcctcggcagccaggaaagcttcataatcttgtctgagaacgaagatgaaagaactttgtgctcaaagaggatgacatctttgatagaaagacacaatattactaagaggtcattgttcttaaatttgtttgtaagatcaccacgatttccaaataatactaaagttcatttgaaaaataagcatgtgagaatatccagaaaaaatatttaaaaagaagaataaggccaggtatggtggctcacacctgtaatcctagcactttgggaggccaaattaggagaattgcttgagtccaggagttcaagatcagcctgggcaatttagcaagaccccatctctacaaaaaataaaaaattagctgggtgtgctggtgcatgcctgtaatcccagctactcaggaggctaaggcaggaggatcccttgatcccttgatcacaccactgcattcctgcctaggcgacatagtgaggccctgtctcaaaaagtatataaagaaaaaataaaaagatgaataaaaggaactagacttaccataatactaaaacatatgataaagctataataactaaaactggtactagaaaatagaccaacatgtcaatggaacagaatagaaagtccagaaatagatactatctacatgggcctttagtttatgataaagggagactttcaaacacactggggggaaaggattatattaaaatatatataaattatataaaaatgtgggggattatatccctcattcatttcatctagattaattttaggcacatcaaagtcttaaacatcaaaaaaatgaaaatataaatttctaaaagaaagcatgtacaaacttagaatcttggagtgaggaagatttgtctaagtaggacatgaaacccagtagatatgtgttttttttaacattttaaaatattaaaatttaaattctgggtgggggtgcggtggctcacattgtagtcccagcactttgggaggctgaggtgggtggatcacttgaggtcaggaattcaagaccatcctggccagcatggtgaaactccatctctactaaaaatacaagaattagctgggcatggtgctgcacacctgtaatcccagctacttgggaggctgaggcaggagaatcacttgaaccaggaggcagaggttgcagtgagctgagattgtgccactgcactccagcctgggcaacagagcgagactccgtctcaataaataaacatccaagacttcaccccgtggacttaatgtatgcatgtttccttcttccatccatgcatgctggcccttcctttgtctctttcctaacttctcatctctccttcttgtgttctcatttccctttatctccatttctggaagacaaattgggatgtgggctttagcatgcttcatgaggaccctcatatcctcagtgctcacagattttatgttctttcaaatattcggacaaatcacgaaaactgcaaatgaggtaggctgaaaatatgaaccaagctgggtgctttcctttccgtgaactgctctcagactggaggaagaagagaaggagaaagaagagttggaaggatgatttggtttttgtttgtttttaagctttcttttcttttgactcctcatttaattatttgcatttcattatttattagatttctccttgattataatttcagggtatgtttctgattaaaacgttgataaaatgttctgttagaggcgagggtcttcccaagaacacgctgtcagcctgcaaggcctgaaagatagaaactgtcatttttttgtttactgaaataggcatttttaaagtttcagctttgagaatgtcaaattttttgtttaaaagttgaaaacatattaaagaaatagaatgctaaatctaaggttcttctctagttaccagagcaggctctttgggatggaatggccttggcttggccagttggttggtagtagggtttggctgaattcaccaaacgtgcttttttttttctctctctctctcgctccctccctccctctctagccttcatatgctgagtttgatattagtggaaatgtgctgggtttgatcttcaaccaaggaatgatctggtgagttatccatttcatctggtgatcgcctcatccaaggagtcaaaaaactggaatcccagactttgcaacttaactagttggaagaggctagataagtcctcttgcctctctgaactcccctctttcacatgaaaaatcaagagcgggactagatgagaagcaggacagtttctggcccacccatgtgctaccatagaagtagagagaaagggagaggggttggtggaggagaaaaggaaaaggaaggaaggcaggagagaaggagaagagggaagaaaaagggaagaaggaagaaagacaaaggaaagggaaaaggaaggagtaaagaagaggaggaaaagaggaggaaaggaaaataaagaaggagggagggagaaaagaaggaagagaaggtggaaggtaaatgaactatggaactccctcttctgaaaagggagttcaaggaggtacataacttcagccaaagactttcaaggtgccaagggctcgctgcaagccactgtccaattctctcaattgaaggacttcaaatactcttctgagcagcaatgctgttttatggaaaccgaggagaaacaggcaggagaccgtataatttgctagatgcctgggggcgagtcagtggtaaaatcttggccagagcttaagccaggaatgctcggagtgcctccctctcctgaggactgcatggttctggcttgatgatcgatattctggttaaatgggaggccccttacctggggacttgccaggaaagcagctcggcctcatgcccctaacccatccgtcccatttccttctatcacccttccctcgccttccctgctgtccagccaaccaggtgtttggtttctgccattccaggatgggctccttctatgctccaggcctggtgggcattaatgtgctgcgcctgctgacctccatgtacttccagtgctgggcggtgatgagcagcaacgtaccccatgaacgcgtgttcaaagcctcccgatccaacaacttctacatgggcctcctgctgctggtgctcttcctcagcctcctgccggtggcctacaccatcatgtccctcccaccctcctttgactgcgggccgttcaggtgcagagtctcagttgcccgggagcacctcccctcccgaggcagtctgctcagagggcctcggcccagaattccagttctggtttcatgccagcctgtaaaaggccatggaactttgggtgaatcaccgatgccatttaagagggttttctgccaggatggaaatgttaggtcgttctgtgtctgcgctgttcatttcagtagccaccagccacctgtggccgttgagtgcttgaaatgaggaactgagaaaattaatttctcatgtatttttctcatttatttattaatttttaactgatagttgtacatatttgggggtacatgtgatatttggatacatgtatacaatatataatgatcaaatcagggtaactgggatatccatcacatcaaacatttattttttattctttttagacagagtctcactctgtcacccaggctggagtgcagtggtgccatctcagcttactgcaacctctgcctgccaggttcaagcgattctcatgcctccacctcccaagtagctgggactacaggcatgcaccacaatgcccaactaatttttgtatttttagtagagacggggttttgccatgttgcccaggctggccttgaactcctggcctcaaacaatccacttgcctcggcctcccaaagtgttatgattacaggcgtgagccaccgtgcctggcctaaacatttatcttttctttgtgttgggaactttgaaattatacaatgaattattgttaactgtcatctccctgctgtgctatggaacactgggacttcttccctctatctaactgtatatttgtaccagttaaccaaccgtacttcatccccactcctctctatccttcccaacctctgatcacctcattctactctctacctccatgagatccacttttttagctcccacatgtgagtaagaaaatgcaatatttgtctttctgtgcctggcttatttcacttaacataatgacttcctgttccatccatgttgctgcaaatgacaggatttcgttcttaatttcaattaaaataaccacacatggctaatggctaccatattcgacagcacagttctacccttttaacacatggataacttactacctgggattactttaccataggataagtaatggtggatattctgaggatgaattaccatacacttacacgtgccgtttaaatgtgaagcagctgcagtggactcttgacagacctcaactgagctctctgctctccagagcattggcctgggggttcaatacataagtcaagctagttgggagactagatattgtataaaaagacaaataattatgtaaggaggtagatcaagagataatgtgcatctactgttctctttccaaatgcctgaccttctgaaaacaaagccctctgccaactccgtaaagagaggttctgtggttaaagcagtttaggacgtactgccccttctgtctgccattatctcacttagaaatgctcaatgcacactcctttgttaaaggctctgaagaatcatgcaatgaggtaacacctgtaagctagtgtctccgtccttattgaccacagaaccctttctgcatggatcactcatccagggctggaaatagggtgaggcaggtgagtgacgccctacactgcacatgagcaaccctgagggcattacttccttaaattgtgcactcagggcctcacccgcctcactctagtcccaaccctgcctgccaatgaggagaaaccctgtcccgtaaaagggtcgtatatgcaaaacagcccctaaatgcccaaagagcctagaatccaaaggaggaaggagacaaatgcagtttgtcggctttgggtgatttattaggggtaacttacagtcagatgcatggtcacaagcagccgtgagacaggtagatctccacacctcaatcccccaggcccagggcttctatcttggggaaagtatgcgtgctctggaaggaatgtataggtggctctgaacatcacagcctgtgatttctgcagcagcatcaagggttgttttggaggaaactttatgtaggaataagagttcctacataaagagtaatacatctgctagtcatgtgggaggcactctcagactcagggttagttagaagttacaaggcagattagcatgtaaaataaagtcactcatgtcccgcacaaacacactttgagaaatgctgatccggtctttctcagttcataaaggactttactagataaaggcctgtgatggttggagcccagggatgttagcaggagtgttccagcagggtgtgatctggaaaacagtgttcacacagaaggaggggatcagtctagaacagaaggaatgtgctgaagtgcagatggcctaagatttagccaggctgaaaggagaaccgaatggaagaagcctctgttggcttcttcctaagcaaggtttggagggctgggccctgggtgcaaatgccagccccctttttctcagcttcccatctgtcactgggtaggaggtcagcagggacaattatactatgataagaaccatctcctacagttgtatggaaaactgaacttataagaaaggaacttggctagccaggcatggtggtacgtgcctgtagtcccagctacttgggaggctgaggtgggaggattgcttgatcccaggaggtggaagttgcaataagccatgattgcaccactgcactccagcctgggcaacatagcaaggctctgcttcaaaaaagaaaaaaagaaaagagaagagaagaaaaaaacagaacttgggtatttagctgaagagattcccaagcaaagtattgaaggtacagcctggtttcttcatgctgcttatagaaaatgtgcaaggaaagaggtatgttgagtaagtaactgataaacaagaaagtaccaggatttgatgattctggaaattctcagccttatctagattgcaaaatatgctaaaactagattcactgtcatgagaatgtgctgtaaaaagaaagccaagagtgagtctggataaccttttgctagtgtttctgaaagatcaaaaggtctgaatatcattcacacagaaaactctgactaatcgtgtgactaatgcatcgcctcaaccatcacatcagaagtcaggaatagaaataggattatccagaaaagatcatgtgggactctcttctttaacagagtacattctcatgacatacatgaaaaactcacacagtttttgacaatattatatcagcggaaacattaccaacttggactgaaagaaacagaaagaagacaaaataaaggcagatcattggcctcccagaattctgtggcgggaaacagactgataaaatttactcagctgagacatgtgctatccttcaagaagaaggaagggtggaagtgttcttccaagggcagaactgtgaacccacaagggcaaagctatgggcacagtagggcagagtctgcagcccagaggattattctcaggactttaaaacttaatggagcttggctgattggatttcaaaattgcttggaactggtgattcctttcttccttccattttctcccttttggtaatggagtgtttacaacttttatcctatgcctgtcccaccattttatttttgagagtaaataactcattttctagttcctagaatcttgagatggggatatcatcatggattagccaggtgggccctaagtcacaagtgttcttataagaaggagggaggccgggtgcagtggctcacgcctgtaatcccacaactttgggaggctgaggcgggcagatcacgagatcaggagttcaagaccagcctggccaacatggtgaaaccccgtttctactaaagatacaaaaaattagccaggtgtggtggtgcgtgcctgtaatcccagctactcgggaggctgaggcaggagaatcgcttgaacccgggaggtggaggttgcagtgagccaagatcatgccactacactccagactgggcaacagggtgagactccatctcaacaacaacaaaaaaaaaaaaaaaggaaggagagggagggagatttgactacagaaaaatagaaggtgatgtgaccatagaagcaggcagagatttaaagattctgtgctgttggttttgaacatggagaaaccccatctctactaaaaatacaaaaactagccaggcgtggtggcaagtgcctataattccagctactcgcaaggctgaggcaggagaatcacttgaacccgggaggcagaggttgcagtgagccgaaatcatgccactgcactccagactgggcaacgagcaagactctgtctcaaaaaataaaaaataaaacccctaatggagcttggctgattggatttcaaaattgcttgaggttggtgattctttcttccttccattttctcctttttggtattggaaagtttataactgttatcctatgcctgccccaggttagtttcaacccagtgaatccctttcagacttctggcctccagaactgtaagatattaaatttgtattgttttaagccaccagcgtgacaaacagcaggcactagaatctgatacaccatctaattcaacgacaaaataatctacattcaactgtcacataaaagcctaacacgtaaacttaacttttctcatttgtacatggcgggtatgcactggaaataaaaataataataataataaatgaaacattgtcatacagtgatgtgcctggcacttgaaatgccatcatgctataactgcgtcattgcaatttgtggtgtgctgggcaacagttgtaagcaatgagatggccacaaatggtctctgacacaactgctcttccctgtcattatagcacaaaaaatgagtgagcatggctgtgttccaataatactttatttacagacactaaaattttaattttatacttcaatttttacatgtcacaaaatagtattcctgttttgacttgctttcaactacttaaaaatgtaaaaatgattcttagctcacagaccatatgaaaacaggtgacagactaggcgcagtggctcacacctgtaatcccagtactttgggaggccaaagcaggtggatcacctgaggtcaggagttcaagaccagcctggccaacatggcgaaaccccgtctctactaaaaatacaaaaattagccgggcgtagtggtgcctgcctgtaatccaccaggcattgtgtgtaaactctggaggctgagacaggagaattgcttgaaacccagaggcagaggttgcagtgagctgagattgcaccactgcactccagcctggacgacagagagagactctgtctcaaaaaaaaaagaaagaaagaaaagaaaagaaagaaaaagaaaacaggtaacaagctgaatttgtccatgagccattgtcggtgaactcctcatctatactttacacagaaaatgtttagctgcaaaattttgaagggcgcttataacttaacagcactacactcaatgttttatatcaattctcatctatatcctctaaacaatcttctgagataaatacaattattatacttaaaataccatattatactatagtattattatactacattatacagatggggaaactggggcagagaaattttcaataccttgcccaaaggtattgaacttctgcagatattgaacatccaatagaacttactgtaatgatgaaaacattccatatctgcatttctaacacagcagctactaatcatatgactattaagcacttgaaatgtgtaactaagaaactgaatttcaaatttgacttcatcttaatttttatttttaatagccacatcagacagcacagctttcgtggggagaaccagggcatgatatgaatacaagcagaaagagaataattgtcaggccgggcacagtggttcacgcctgtaatcccagcactttgggaggctgaggtgggcggatcatttgaggtcagaagtttgagagcagcctggccaacatggtgaaacaccatctctactaaaaatacaaaaaattaggcaggcgtggtggcgctcacctgtaatcccagttacttgaaaggctgaggcaggagaattgcttgaatccgggggtggaggttgcagtgagctgaaattgtgccactgcactcaagcctgggtgtcagagtgagactccatcaaaaaaaaaaaaaagacagagagagagagaataattgtccacgtgtctcaccagtgataaatgggggatcaaggatttaaaccaggaatttcaaaccccgtattccacctcttggcaccaaaattatcaaccaagagccagcagcatccaggagtctctgggccagcatttgtagaagtaaatctgcataatggttcttaggtatttgaagaaaataaaaattacagttgtgaactgtccaggagcctgtcctaggtgatccaatatctcctagacttaaaatctgaaggttaattctaggtatttctgagagacactcaggttgtccagcacatcagcttctgcagaactgtttcccaggcccaaaggaagctccatgttggcctggtagctacaaacacagacaatttctccagttagaatacatgaggaaaaccatttttttctggctgaggaaggtgtcagacacaaaagaccagtgaaggctaagaggttgtaagttacttaggatagaaagccggtgagccgtgtgccgacccagctgtcaccctagccagaatggcagcccctcagggggaattttttacttgcagttcatttggagcagagctctggttcttccaggaaagcagtggcaggcagcagccctggacctgggtaggggggccatggacacagctgtgaatgccacaggcacatggcagcatgttatattgtgtcctctcctttttccagtgggaaaaacagaatgtacgatgtcctccaagagaccattgaaaacgatttcccaaccttcctgggcaagatctttgctttcctcgccaatccaggcctgatcatcccagccatcctgctgatgttgtaagttagccaggacccatggctccaccccacggaaacttctccttgaatttgagacttccttggcaggtccttttcatcttgccttcttagtctgcactccccagaagcagaatccatgacaaggattcaagtgtaagtattttattagggagggggtgaggacttgagacaaggaagggaaaggaaaatgcatggttatcactgtgagaattctgggaggcagtgtgcctcagactcagccctccctaagggcaaaggatccgaggcatttatagaccagctcccagcgtcattcatgggtaaaatggcttcaaggggtgtgagtgaggggtccaagagggaagggaagcttctggtaacagagatgagggcaccagcaagtgcaagtcttttggagcacactgaaaatttgggtgagccctgacagtatctgcaacaactcccactaaaatgctcactagaaatatcaaagtcctgtgggctctgagcctatcaggaagctgaacggtgattcggcctgatcctggctgggcccacagcactactcgatggagcagcttatacactggaacaagctggttccttcatcactgtccccctcaacaaccattagagaacaagttcgaaaatctctgtatccccggtgccagcctaatgcctagagcatagcaggcaaacagtaaatgctcaaggaaagaactagggaagaaaggcaggaagccagagtcttggattggaattgttgccatcaaaaaatgtgctagtaaaaatgttagcattttttctttatttaaaaaaatcttattttggcatgcttttttaaaaattatgaaatattcccagcatacaaatgagtacagacaaccatgtacacgatcacaagattcaacagatgttaacattttgcaatatttacttcaggtttatctttcttcgtaatagaaataaaacattacagatgcacttcaagccccactcaatccttctttcttcctccctccccaaaggtaactattatacagactagatttaattatttccatgcatattttgtactttttaatcacatgtgtgtatagtactgtttccggagttttaaaccttttcatgaatgactcacattacatgcttttcctcaaacaacattatgttgggggatttatccatgcggatacatgagcacatgtttgaaggctctactatgttccatctcatgaataagccacagtttatccattcctctgcatagggatagttaggctgtttccacttttcggctattgcaaactgcgctccagccaacattttgtatatatctccttgcacaattctgagagttgctctaaggtagacatctagaagcagaattgtgggtcatcagcatgtgtttcttcaatctttttagatcttacagaattgctctccaaagtggttgtattccctttggactgttatttataaattccaactctccggtgaaattctccagctttctattttcttgaacatagtggttataattacttttaaaatcccagtctgatattccaatatctgaaccacctgggtgtatttttgttgtcatttgttttcctcttgtttatcctcagccctacttttatcatggcatgtaatttttactagatgtcagacatgtggatgaaaaattatagaggctgtgaataatgttatctttccccaaagggatgggttttttttcctgaagggcaaatggaatactaggagatcacttaatcctgtcaagacttgatgttttagctatctattattacataagaaacaacccccaaaactgaaaaataatattttattaatgaatctgcaatttgggtaggacttagcaggaatcattcttttcctctctactcaacatcatctgggtcagctcagctggaggctggagggcccactttcaagatggtcactcacatgactggccagctggcactggaggcctcacttccttctcacaagctgcttgggcttcctcatagtatggtggctgagtttcaggagcaagcatcccaagagaatgcagtggatatacatggcatctttacttactcctgccatactctattgaagcaatcacaaagggatacccaggttcaagagaaagaaatatagacttatcttttgatgaggcaatgacaagattctagaagcacatgtaagacaggagtcatagtattgtggccatctttggaaaatagtttgctattgctagctttgggctttctcagggctgatttatttcagttttgccctatttccaagacactgaccttactcctacaatgtgatccttactattgagcacagtcttttaggggtctcaactgaaagcctacagtgtttaccaattccctcctgtgacagttactacgggactgaacgaagtaggacgaacacagaaatgaagacaaagaaaaaaaggatttgttttaaagaacgggtcaggggactccttgcttctagtgagcaaaggcagccctgagcttctgcagccctgagcttctacagcccttcgtatttattgggtagaaagagcagggaggaggaggtaacgattggtcagctgtttgattgatcacgggttcacatcattgctaacaggcctcagatgtgcctaaccacaagaaacactgtgcctggggcgtgactgccctcagcattccttctgggtgccgacatagttgtcagcttgccaacatcctgcattcatgagaacagcttgctgtttactcatatagcctccagtcgtatactgagttgatcacgaccctcattcttttggcctccaccaccctccaccttggcagggcttaaaacccattctctcttttcccaattcttccgtctttgcttattctttttctccagtagtactgctacagccactgtgaaatctctgctctgctcttcagcctctctggtgtcattttcttctgggcttcctgaagcaattgaagaattggtcaatcatttgagggcaatttgtacacagagtttggcttatttatctgcaatttgttcttctctgggattctgcccctcaagtcccaaagactgtggcagtaattaactctgacctgcatcttctccacattgtaagatttccactttctgcttggactctgcttctgggtcacaaattggaaaatactctcagggagaaaccctggaggaatgtggagctcacctcacatgcttcccttctctcaagcatcaagtccctttagtctgcctgtcactctcccatgtcttaaactacagttttgtaaattttgctcagcatttacagttgtttttctctggagagctggaccaatacaagtcccttagtcaagaccagaaaaagaagtcttttctttcttcatttgattttccacagaggcaggctccctagcaccaaaacaacaacaaaaataatctgtgatcatttttattagaattcagaaagaaggccgagcatggtggctcacacctgtaatcccaatactttgggaggccgaggtgggcagatcacctgaggtcaggagtttgagaccagcctggccggcatggtgaaaccccatgtctactaaaaatacaaaaataagccagctgtggtggtgtgtgcctgtaatcccagctacttgagagactgaggtaggagaattgcttgaacccaggaggcagaggttgcagtgagccaagatcatgccactgcactccagcctgggcaaaagagcgagactctgtctcaaaaaaaaaaaaaaaatccagaaagaattggcacacctatgttgttaagttttccaatccaagaatactgtattccttatcattttttcatttatgtctctcaatatttttaagttttcttcataaatttcatgcacatttcttattaaatgtattcctctgcatttctctttttgttatgataaattaggatagctctttcatcatactttctaactagtttttgtttttctatgtaaatgttatttattttctatatataaattttgtattcagtcactgatatagttaggctttgtgcccccatccacatttcatcttgaattgtaatccccataatccccacatttcaagggcggggccaagtggaggtaattggttcatggaggcagttccccccgtgccgttcttgtgatagtgagtgagttctcacaagatctgatggttttataaggggctcttcccactttgctcggcacttctccttcccgccactttgtgaagaaggtgccttgcttccccttcaccttccacctgtaagtttcctgaggcctcaccagccatgctgaacagtgagtcaattaaatctctttcctttataaattactcagtcttgggtagttctttatagcagtatgaaaacaggctaataaggccgggcacagtggctcatgcctgtaatcccagcactttgggaggccgaggcgggcagatcacgaggtcaggagatcgagaccatcctggctaacacggtgaaaccccgtctctactaaaaacacaaaaaattagccgggcgtggtggcgggcgcctgtggtcccagctactcgggaggctgaggcaggagaatggcgtgaacccgggaggcggagcttgcagtgagccgagatcgcgccactgtactccagcctgggcgacagagtgagactccatctcaaaaaaaagaaaacaggctaatacagtcaccctatgagtgtattgtttatcatatttactcaaccaaagttcttgaatcttccaggtcattttctcatttgtaaacaatgaaaatgttatattttatttaattcttagatctctttttttctctgtaggattaattagtaccttccatgggaaaaacaagttaattaatatttggtgatgaaatatatttttgtatttttcctgcatttacagggtggggagtgcttttaatgttttcagttaagcacagtactgcttttttggagagttgagataagtatattcatgaaataaggaagaaaacaaccagggaatgtaagtcattgtaacataggtataagaaatcaataattaggaaagtggagtaacttttctaattattgatttcttacagaagtaaaaaaaaaaaaaaaaaagtgacctcaaaaggtggtggtgaatttagggccattactagcccatatagtaccttgtgcaaattttttaaaggtgcccactccttcagacggaggtaggcccatgccaaggggcacatttgacaaacagaatatggatagatttcagccagcagtcacccccttagtcaggtgccttttatgcagtaaacagcctgtataatggctatctaagccagaatctttttcctttggtgtagaccaggggtcatcaaactgtagtccacaagctaaatccggaccacacttgattttgttaaataaagttttattggaacatattcatgctcattcatttatttattatctatgactgtttttcacagaaaaagacagaatttacttgttgtgataaggaatgtattgtctagaaagactaaaatatttattgcctggccctctgcagaaaaagtttgctgatccctaatgcagacaataaggaaccactttcaaatatgctttgacactgaacttaaaacacctaatcagtaagacttaaaaataatgacaaataataagtccaaaaaatatttagaagaagaaggaattaggattgtagaagacaataaatcttgaacttgagccttgataaattcaaggctcaggaaaaggagtcgattgcattggatagaacttttagagttgttcaagtctactattttcttgttgaccttctaattgtttctattactgaaagtaaagcattgaatttccagctattattattggattgtccattatctctcccttaaattctgtttttgcttcgtatgttttaaggctgtgttgttaggtgcatatatgtttttacttattacattttcttgatgaaatgacccttttacaattacaaaataatcctatttgtctctaacaatttttgtcttaatgtgtttcccatccttttactttcaatctactattaccttaaaaatctgaagtgtgcattttttggctgggtgtggtggctcatgctggtaataccagcactttgggaggctgaggcaggaagattgcttgagcccaggagtttgatatcagcctgggcaacatggcaagacccatctctacaaaaactttaaaaattaactgagtgtggtggcacatgcctgtagttccagctacttgggaggcgacaaaggtggaggattgcttgaactgaaaaggttgaggctgcagtgaaccatgtttgtaccactgcattccaccctgggtgacagactgagaccttctctctaaataaataaatgaaataaaatatagtgtgcttctttggaaaagcatatagctgaagcatagtgtttatccattctgtcaatctgtgctttttatatggagtgtttgattcatttacatttaattaccaataagttaacatttatgtctgctgttttctatatgtcttatgtatttttgttattttattcctctattactgctttcttttgggttaaatattttagtacataattttagttcccacgtcatttctctaactatattttgttttagttattttctcagtgattgccctggagattataattaatataacaaactactttgaattaataccaacttaattataatagtatacaaaaaccttgtccctgtacaactccattccctccactctccttcaggttgtttctgccacacaaattacatctttatacattttatgccaactgaataagacaggagaaaaaagagctacaaagactacattgatactagctttcatgttaacccatgtagttacctttactagtgctctttatttcttcatgtagattcaagttactgtctagtgtcctttcgttttaacctaaagagctccctctagcatttcttacagagtaggtctgctagtgattacttctcttggtttttatctgggaatgacttaatttctccttcattcttgaagaacagttttgctggatttagaatttttggttgatagtctttctctttcaatctttcaaatatgtcatcccactgccatttggcctccatggtttatatgaaaaaacaattgactgttaatctttctgaggctttcttgtatatgattatttgtttctctctttctggattctctctttgactatggctgttttttttttcaatttgctatgatatgtctaggactagatctctttgagtttatcctgcatggaatttgttgagcttcctgtgtaaattaatattttttcatcatatttggggatgaaatctgattaaaaatagccattatttattcaaatattctttctgaccctttctgtctttcctctcctcctcagattcccattaggcatgtgttgatacatttgctgttgtcccataggctgtgttattttacctcattcttttttctttctgttcctcagactggataatctcaactgatctattttcaagttcattgattcttttttttttttttcgagatggtgtctcactctgtcacccaggctagagtgcagtggcatgatctcagctcactgcagcctccacctcccaggttccagcgattctcctgcctcagcctgtcgagtagctgggattaccggcatgtgccaccacacctagctaatttgtgtatttttagtagagatgggtttcactatgttggccaggctggttctttcttctgtcatctcagatatgttgagcacctccagaaaatttattatttcagttattgtagatttcaactccagaatttctatttggttattttatttatttctttttgctaatattctttatttggtgagacatcattttgatactttcagttctttagaaatggttttgtatcgttctttgatcatattctttgatcatatttaacataactgatttaaagtctttgtctcttaaatacagcatcaaggtttcctcaggaatggtttctattgactacttttccccctgtgtatgggccaggctttcttttttctttgtatgtcttactagatttttggggttttttgtttttgtttttgtttttttacagagtctcactctgttgcccaggctggaatgcagtggcgagatcttggctcactgcaacctccacctcctgggctcaagcaattctcctgccccagcctcccgagtagctgggattacaggcgcccgccactatgcccagctaattttttgtatttttagtagaaatggggtttccccatgttggccaggctggtctcgaactcctgactttgtgattcacccgcctcagcctcccaaagtgctgggattacaggcgtgagccactgcacccagccatgtcttactagtttttgctgaaaactggatatcttaaatagtattatatggcagccatggaaatcaggttcgcctcccttccatgggtttgttgttgttgctgtttgttgttataattgttgtcgttattgttgtttaataacttttctgaactaattatgtaaagtctgttttctttgttgtgtgtggccactaaagtctgtgctcagttagcttagtagacacctactgactggaaagagattttcttacatgtctggaaccagtaagactcccagtatttcccaacaggctctgtgtatgtattggggtatgccttcaacattcaaccaggcagtttacaactctaccttagctgtcactgactgcttgttcagagactcaaggttaccagaggtgagagctcagggccttctcaagtctttcttggacacataaacagccctggacaggcacagagccttacacatcatgcacacagttctctatagattcccaggaatatttcaaagtgttttaaagcccccattggacatcccattccccagttctccttttaaactttttggttagcctattgtttgccccaactgttatgcaacacttctcacagccgtgatgttcaacaattgcctctgattgcttttgccaatctcagagaaaaagttcacactgattgggctttgagccaggtcaaataaagatagccttgtgagtagtatcaaccactggataaatcaaataatgacagttctctgggtctgaggattttaaggtgctccaaatccattctacctcctccagtgactgccaggctactgattttcaccaaaatttggtgctgttggtttccaaacctactacagaactgggtaggggaggggatataaggcaacttagatgctgcagaactcactgttcttgctggaatttagctgttttccttgaaaaggtactccctagatctgctgcaaacctttggttaattttgagttctgaaaaaatttgattctgacaattttggctggcattctcactgcttttaaggaagagaggattttcagaagtctttgccaattttgctgacatctggattgaactttagccttggatgggcttaaagactttgttaaaaccttccctctttgactatcatctttgttgttccttagatgtatctgtttgtctctgtctgtttatgctttgaaattcccaaaaagtatttcaagaaatggctgctcctcatcagggctctcttcagctacaggatagtctgatgaagccggcctcccccaacgctgtggtcagtttcctgcccgctgctcaaaggctgccagcctggaggggaactggagctccacactctgcaatggcgcctctccttcagcaccctctctggtagcttactcaaaatgaacatagactcacagagattccaggaccctaagggggccagagtgaatgtagaatcctttcatttgttcatctattcatgtaacacccattcttgaagatctgctctgtgccctgaatactgtcattgccaacagcaaacacttgtgtgttgttttatatccttgatttcaaatttcctctgctgctggcatgacagggatgacatgatagtgacaatctggattgccttgtgccctcctggggaaattctgaaagccagacaccaaacctgaccctgaaggcaccaaggagaaatgctaaatttggaaacaaccttgggaggtacatagccacccatgagcattttatccaccatttgctgggtctgtgatcttgagccagacaagttacctctctggcctctgacctctgattcctcccttaaaaaaatgggctaattaggtaaatggcaaggactggcccagagtaatgccttacataacagaaattggtctcttcacctgtcctttattctctcctcccctcacctatagttctctgaatctctgaatccttgcttcagaaggctcacttgacagcctctgacctacactctgccccaaagaccatggggctcctcttctctgactggagagggctcacaggctctattgaggcagttatggatggcctagccctgagggggaaggttccagagaccaaagctggagcagctgagcttgaaagtcatggagaaaaactactaataaggatggacataaaaagctagcagataataggctggcaaagcatccactccaggtggcagtctggcttttgtgtgtcctgtgtagtacagtccaggtcataaccccagaccttaggacctgtgaaaagaaagcctgggctgcagcctcaaaggacacccgatcacctagtgagccaatgggggctggactctaaaacccataaggtcagggccagacatgctagggcactctgagcaggaggcttcagagcatctgcaattgtgcttcttcggcaaacttaggtctcttaacacctccacctccccctctcagggtttgaaaactgtagaaaaagtgttggtttccaatgtgggctgcaaagagtactcatgggtgggatgaccttggcaaattatttaacctcactgagtcccaggacccaggcctttaaacatagaagtctactctctgcttcatggcattttcatcaaagccaatgagatggggtggggtgggggtggattgtgcacatggcacagagcttggcacagggcaggtgcccaggaaacgtgaccagcttcttctgcagtcagtaaaccctgccaccctctggccacctcagatttcccagaagagggatgattcctccagccaacctttactgagcactcgcagagctagagctatgtagttatgcccacgcataataaaatagagaggatgcaggggcatccaggaccttctccacattgagaaaagaagatggtaggacacccacccaaagcctcagtaactattccaggaatcctgccctgattccccaagaaaggcgcccagctcctatcatctgccaagatcacgggaccataggaggcatgcttttctcttgcagcttggccatttactacctgaactcagtttccaaaagcctttcccgagctaatgcccagctgaggaagaaaatccaagtggtgagtctgttgggagtttcatcctggacggtaaaaagagatcatgtttttggtttttgctaatttgctgtgtgagcccagctgtgttatctaaatggctttcttctaaaccaaatcccaaaatatctgtattatgggaagtagccttgtgagattcaacagcatgcatttatattattgaggctatttggtgatttgtgacaataatgacttaaatttcaaggggttactaaagaacaggagaaattcagtgagttcagccaatgctcatacagaaaaagccagtatccacaataactcctacaggttaaagtgaatatttaaatactaaaagaaatgttgtcaaaatcacgtatttcttgtgccctttagcctaaaagatctcctgagtccccttcacacatgggaagcctctctcaacatcccagctgacaccctacttctgactgctgtctacacacacacacacacacacacacacacacacacgcacacaccctaaaattcagaccctaaccctccctaagccctgttcttgctttctctgtccctcttctggagtgaatttcatctgtcttgctactggtccccccgtccacaccttcttctggttttttgtttgtttgtttgtttgttttaagatggagtctcgctctgtcaccaggctggagtgcagtggcacgatcccagctcactgcaacctccacctcccaggttcaagtgattctcctgcctcagcctcccaagtagctgggactacaggcgtgcatgcaccaccacacccagctaatttttgtatttttagtacatgtgagccaggatggtcaccatatcttgacctcgtgatccgcctgccttggtctcccaaagtgctgggattataggcgtgagccaccgtgcccagccccttcttctgttaatctcactgggctcctgcccaggtacagaaaaccactgaaatagaggattggaaagatcgctgtcctctggccacatgttccttcaattgctatgtgaatctgagagcctcaggctgccctctccaatcagttgtgaggaccagtaacaggcagtttaagatagacaccaagaactgaaaacaggccgggcatggtggctcacgcctgtaatcccagcactttgtgaggccgaggccggtggatcacctcaagtcaggagttgaagaccagctgggctaacatggtgaacccgtctctactaaaaatacaaaaattagccaggtgtggtggcacacacctgtaatcccagctactcgagaggctgagggcaggagaatcgcttgaacccaggaggcagagattgcagtgagccgagttcacgccgctgcactccagcctgggcaacagagtgagactctgtctcaaaaaaaaaaaaaatcactctcaacacctctgagcctcaaagacccatttcctgggccaggaccaacagttcattatttcctgcagctccgtgaagttgagaagagtcacaaatctgtaaaaggcaaagccacagccagagattcagaggacacacctaaaagcagctccaaaaatgccacccagctccaactcaccaaggaaggtaagctctttgtcataatgattatgttttacaaggccacatggaaaggtgtaaagagcctatgaaacagcgtgaaatcagactgttctgggattgaaatcagaatcctaacaattattagcttatgaagttgggcaggtgaatataggggtcaatcatagcacctgcctcatgggatggtgaagatgagatgtaatcatgcatgtaaagtgcctaccagaattcctggcacagagaatgagccaatgaataccagctggcagtagtgccgtcatgcaccccttaataacatttggatcaaccatggatggcatctacaatggtggccccataagattataatggagctgaataattcctattgccaagtgacgtaactgtcaacattgtagcaaaacacattactcatgtgtttgttgtgagctggtgtaaacaagcctactgagctgccagttatataaaagtctaggccgggcgtggtggctcacgcctgcaatcccagcactttgggaggccgacgcgggcggatcacaaggtcaggagatcgaggccatcctggctgacacggtgaaaccctatctctactaaaaatacaaaaaattagccgggcgtggtggcgggcgcctgtagtcccagctgcttgggaggctgaggcaggagaatggtgtgaacccgggaggcggagcttgcagtgagccgagcttgcaatgagctgagattgtgccactgcactccagcctgggcaacagagcaagactccatctcaaaaaaaaaaaatctctagcacatacaattatatatggcacagaatactcaataatgataataattatgttactggcttatgtgtttactatactatactttttactattattttagagtagattccttctacttatataaaaaatagttaactgtaaaacagcctcaggcaggtccttcaggagctattccagaagaaggtgttgttatcacaggagatgacagctccatgtgtgttattgcccctgaagaccttccagtgggacaagatgtggaggtggaagacagtgatattgatgatcccaaccctttgtagacctaggctaatgtgtgtgttgcatcttagtttttaacaagaaacattttaaaagtaaaaagaaaaaaaattcttaaaaacagaaaaagcttatcaaataaggatataaagaaaaaatatttttgtacaggtggtcagtgtatttgtgttttaagccaactgttattataaaagagataaagtagaaaagttacaataagctaaggtttattattgaagaaagaaaaaaaaaattttttttgagacagagtctcactctgtcacccaggctggaatgcagtggtgtgatctcggctcactgcagcctccacctccagggttcaagtgattctcctgcctcagcctcctgagtagctgggattacaggtgcccaccaccatgcctggctaattttttgtacttttagtagagacagggtttcaccatgttggccaggccgttcttgaactcctgacctcgtgatccgcccgcctcggcctcccaaagtgctgggatgacaggcctgagccaccgcgtccggcctagaaaaaatatttgtaaattgagtgtaacctaagtgcgcagtgtttataaagtctgcagtagtgacagtggtgtcctaggctttcacattcactcatcacccactcactgactcacccagagcaacttccagtcctgcaagctccactcatggtcagtgccctagacaggtttaccatttgtcatctttcatatactctaccttttctatgtttagatacacaaatatttaccattatgttccaactgtttataaagtattcagtacagtaagtgttgtgcaggtttataatctaggagcaataggctgaaccatatagcctatgtgtataacaggccatgccgtctaggtttgggtaagtacattctatgatggtcacacaacaacaaaatcacctaatgatgcatttctcagaatgtatccgcatccttaagcaacgtgtgctatagtttatattctctgaaaagagaagcactggaatatctagaataatagagtgagaaaagtcaacataaaaagttcccaggaaagtatcttggggctattgctcctcggccttttggctaagatcaagtgaaaatatcctggggcttcaaaggggagtgatcatagaccacctcaaattaggagtgaggaaaggtcaagttgaaagagaccatctctgagatgatcccattttccagagatcatctctgttttaaaattaaacagtgtctgcacgcagacactttagccttggatgtaagaagtgaatgagatgcataaggaatgactgacagtttaggaatttgaactttatttttttgagatggagtcacactctgtcgcccaggctggagtgcagtggcacgatctctgatcaccgcaacctctgcctcccaggttcaagtgattctcctgctcagtcttctgagtggctgttattacaggcacctgccaccatgcctggctaatttttgtatttttagtagagatgggatttcaccacgttggccaggctggtctcaaactcctgacctcaaatgatcagcctcaagtgatccgcctcaaacggcctcccaaagtgctgggattacaggcatgagccactgcacctggcctgaactttttttttatacaagcattccaatttcttagtaactggaattttattcattttttattattaagtattcgctataataaaatgatactagctgctgcaacaaagaggcccaaaatggctagtggctcagacaccataaaagttcatttctcactcaacacaaagtccaaactgggtgctttcacctgacagcctcaagtgctgatatggggaccctggctccttccatcttggggctctgcctgcatcaagctagtgcaaggggaagagcttaggggacacacctggatgtggtcccatcaaagcctggaactccagcacaggccacactcatccacaagggaaccagagcccatttctgtgtcccagaacaagagggactgggtttagtaaagagcagtcattttccctaacttggagttagaggaggggaaggaaacaagttaatgaaggattggaaagtagatctgattccaaacaattcccacagcccctccccttccgtcatcacttttgaccccggcagtcaccctgcgaggctgccgttattcttgtcccaattttgtactctagaaaacccgggatcagagagtctagcctaaggccaggttcaaaatcaagttctctagccagaagaccatactcctccaacagatgtgtttatgcaaaagccaggccaaggtgaccccgagacagctgagtgcaatccgacagctctcacatcaccaaataggactaaaacctacacacaccgcagggcgactccagagagctccaatccaacctgtacaaaatctcccacttcctctttcttgtcttggttcgttttccagagaccactcctccctctgccagccaaagccaggccatggacaagaaggcgcagggccctgggacctccaattctgccagcaggaccacactgcctgcctctggacaccttcctatatctcggccccctggaatcggaccagattctggccacgccccatctcagactcatccgtggaggtcagcctctggaaagagtgctcagagacctccccactgatggctaggactccagggagcctcgaccctagggctgatcctcaagtaccccagtttcacacataccaaaccaaggttctctcccctctttcctctcacatacatgctctgtctcctctcttggaatgcatgaactttgattccttcaggcccttgtcagctaccgaaggaggaagacagtggcttcacctgtcctttagggaagctggagccatctctgcactaactgccctcccaaatatcttggttcagacagctctgaaccccacgctcacagtggtcgaccttgcctcccgattttcggagttggggaagggccatgaccaccctcgtagactttttccatgggatacagtttaggacacgggtttctgccagcttccctaaccaggagggggatggagaagggcctacatttctcaatccagaggaagtgagctggtttaaatgaaaggtccaggccaggcacagtggctcacacctgtagtcccagcactttgggagaccaaggtgggtggatcgcttgagcccaggagttcaagaccagcccgggcaatgtggcgaaaccccatccctacaaaaaaattagctaggcatggtggtatgcacctgtaatcccagctacttgggaggctgaggcagaaggatcacttgagcccaggaggcagaggttgcagttagctaagatcacgtcactgcactccagtctgggcaacagagtgagacgctgtcttaacaacaacaagtctggccaggagtggtggctcacacctgtaatcccaacactttaagaggctgaagtgggaggccaggggtttcagatgagcctgagcaacagagcaagacccttgtctctacaaatagataaatgaatcaaagtaaatgaaagtgaatgaaaataaaggtaaatggaccaaagaccagtcatggagagtggggattggtgggaagactggtgataccccagtacccagcccaagggaagcttacaccatggagcacaaaacagggagtgaaaacagtgaatcacaggagcgagtgagttgcccagtgcctcttatcttggaaggaaacctgccttacccagggcagaaaaatctttttcatgcaccaaattctaaaaggaatttgataacatgattattgtacaaaagaccttgaagatggtttctctgaagagttttgcaaaaggtacaatgcagagcgttgtctctggggattctatgttcacttagtgtcatatcatggttctatgcagaatatttcttagggggaagaagccaggggccagaccattaagaaggccttgatggcaagggcagagcctaggtagggtgggagtcacagtccaggactctgcaacagcccagctatcttgcacacagctccttcctttcctccactctgtgctcccagacccaggtaagcagtgaggcctcagagggccccagagaccctctcacccatgtctctgagtgttctaaagagagtcagccaccttaacctcatcaactgttacagccaccacccaaccaggcccccaggggttctcaggagaatcccccagactcagaaagtcaggcaaagccctggcagagagacgaagatttttacagcaatttcataagctgtacaattaaaataatttctaacttccctcccaaatcccttcccttctcaatccagcaccaaaacttcacatatatatacaaactgcaatggaataatagggacatgtgaccaggagaaacaggataaattatttcacaccaatctctcctggcaaggctaacgaagatgttgcaatgcctgatttccatggaacccaggtccaagccccaaatccaaaactgcctgtgtgtcatatgccttcccccaagctaacctacctgaaacctcagtacagggatcctggcactgtaacccaaccaatcaggaccagaaggcccaaagatggccaccacaccaacacctggccttctgcatcagaatgccaggccctgaggcagggaacactctgcctgcctgagccattggtcccctagtgattactgtcaggcctccactggttactaatacacataaatacccaccacaaacacaaaccaaccatcctgatctgatgaagtgtaattttatgtgacggaatgtatatgtcatctaatgctgcataacaaattattcccaaaacataacagcctaaaacaataaacaattatgtattattgtatgtagtttctgttctgtgggttataaatttgggagtggcttaactaggcagatgtggttccggatatttcagtcaaattctcagctagggctacaattattggaaggtctgactgggactgaaagatctgctctcaacatggctcacacgtgactgttggcaggaggcttctgttccttgctggctattgataggggaccttggttactctccatgtaggcctctccatagagctgcttgggtgtcctcacaacatggctgctggtttcccccagagcaagtgatctgagagggagagcaaggaggaagccacaatgcctattatgacctagtctcagaagtcacactatcagttccaccacttttactcatagaactgagtcactaagtctagctcacactggaagggaagggatttaggcttcacttcttgaagggagggttaccaaagaatttgtggacatattttaacagaaaattttctaattcaaataattacaagacctctatcaagacaactctggccaggcgtggtggctcatgcctgtaatcccagcactttgggaggccgaggtgggtggatcacttgaggtcagaagtttgagaccagcctggccaacatggtgaaacctcgtctctactaaaaatacaaaaattaaccaggtgtggtggtgcgcttctgtaatcccagctacttgggaggctgaggcaggagaatcgcttgaacccaggaggcggaggttgcagtgagccgagattgtaccactgtactccagcttgggtgacagagcaagactccgtctgaaaagaaaagaaaaaaaagaaagaagaaaattaaccatttatccagagaaatataactggtgtcctgctgatattaccctagtttggctgcgcattcctaactggagagaaatggagcagatgctggattttatctgttggaagctatttttgtaggctgatcctttcacttctaataacttcaacttccatttctatttcctaagagctccatagtacacagaatcacataagtaggaagacactttagatgaagaagatcaaaggggatacctggtctcccactgatttgcacactcgcagaaactaaggggaggggctgatgcaccagccagtaaggtgatctgggcaggttaccaatagcactcactatggtggtaacgctcagctcagtaaagtcacttcagacgtgctctgaagtgggtgggtagagacccacccaaagctggagcaccaagttcctcatgctcaataatggacaataaaaaataaacccgccatgcagaaagagacatgtatttctcttgaccttggcagaaagtagaggagaaaaagtctccattgagaagttctagccacaaggcagctctcacagagaggctctaaattcatatgctacagttgacccttgaacaacactgggtctaggagtgctgacccccctgcagtcaaaaacccatgtatagcttttgacttccccagaagttaactaatggtagtctgctgttgaatggaagttttactgataacataaagtcagttaacacaaattttatatgttacatgtattaatactgtattcttgcaatagaataagctagctaggaaaaaatgttattaagaagatcatgaagaggagaaaatatatttaatattcatcaagcaaaagtggatcatcgtaagtcttcatccttgtcatcttcatgctgagtaggctgaggaggaggaggaggaggaagaaaaggggtcggtcttgctgtcttaggggtggcagagatggaagaaaatcacatataagtggatctgtgaagttcaaacccatgttgttcaagggtcaactgtatctgtatgttccaaaaaactcaaatgaaaattttaatttatttttttcaagactttcaggccaggcgtgatggctcacacctgtaatcccagcactttggaaggccaagacgggtggatcacaaggtcaagaggccgagaccatcctgtccaacatggtgaaaccccgtctctaccaaaaattcaaaaatcagctgggcatgttggctcatgcctgtaatcccagccactcgagaggctgaggcaggagaatcgcttgaacccgggaggcggaggttgtggtgagccgagattgtaccattgcactccagtctgggcaacaagagcaaaaccccatctcagaaaagaaaaaaaaaagtggcattaggttgatagtgcctccaaaacaggaagaaaaaaggcaaataaacaaaaatagcacaacaaataaaatataaagcacataagacgaaagaaataaaccaaaatatatcaggaatcaaaataaatgcaaacggactaaacttctagatagaaggcaaagactatctgatggagattttaaaatcctataagctgttcccaagagatgactttaaaactaaggatagaggccaggcatggtggctcatgcctgtaatcctagcattttggaggctgaggcaagtggattgcttgagcccaggagttcgagaccagcctgggcaaaatggtgataccccatttctacaaaaaatacaaaaattagccagtgcatgcctgtagttccaactactcggaaggctgagatggaaaggatcgcttgagcccaggagtcagaggttgcagtgagccgagaccacaccactgcactacagcctgggtgacaaagtgagggaccctgtctcaaaaacaaaaataagataggaactttatcccttttgattcctagggaataaaaactgaagtataattttcaatggcaaaatcaccaggtgtgtgagtaccatcaaatattctaagcaggtttgtttatagagtgtgaggattgctattaaagacaactgtctgcagtgttgtgccagatactttatctttcaatatagtattagcttgaaaaacatgaagaaaggcccaaggtcatagttggggtagatgtggtatatagagcatacagataactctatcactgaaccgcgtctggaaaatgggctatataaaaccaacctccaaatttgtctgtgaagattcaacaagttgatggaagtaagactgtaatgtgccaagcattatgctaagtactcaataaataacagatatcatcacaggcatggataagatctaacatccttgggctcaggggataaacacaacagtatcttgtgctctataatcctaatcaatggccaggcttcagaagctgccaggtcatcactgccaaaaaaacacaaggaatgctgggctaaaccaccttcccaaggtacttttcattctcctgtgtctttataaagaaatgctgcatatacatgtaactcactgccaaagaatattgtagggtttctttccacttttgagaaaagagcccaggaattgctagcaagccttttaaattttatgagaattttctcactcacaaaaggagtataaagtgccgccctcttgtggtagtttcatgaaatttcctttcccgaagctctcccaaggcactgaatttattttatttatttatttatttatttatttatttatttatttatttttgagatggaatctcgctgtcgcctaggctggagtgcagtggagcgatcttggctcactgcagcctccgacttccgggttcaagcgattctcctgcctcagcctcccaagtacctgggattataggtgcccaccaccgcgcccagctcatttttgtatttttagtagagatggggtttcaccatgttggctaggctggtctcgaactcctgacctcaagtgatccacccacctcggcctcccaaagtgctgggattacaggcgtgagccactgtgcatggcctggcactgaaactgaaatagcacattccacttccataggtccccattagtgttgccagagtaaaaaccttgggctaatggacaccaaaatgacacagttagccataggctgggctaaatgaaaaaggtcagatgatatagtatatggttcttcccaatgggtgaacagtcttatggacagagaaaaagaaataggccccacctgccacctggctttaatgtggaacctggagcacatctgggaaactcatggctcccactcagacctgctgtccctgcaggacatttgctcagtgggagccctgtgagcaatttgtcctccatatcacctccaaattaatctccaaacactgcttaatggaaaagcaagagtctcatcagaccaaaaccactcatcctgactttcattcaaggtttcttacattctagatccttcagtcttttgtccaactactgaccagtttgcattttacacctctagcaggttcttctcttgtttctggcttttgcttccactctctttccatcctccatctctaaatgacctacacactcttctatgaatagctaaatcccttcttgccatgaagtctacctcaggaacactgggccaaattgtcttcctgtcagcttgcatacaactgcatcttagcacctgattatattcagtctcccaggattgcaaagtctctgaagtcaggggtcacaggttagtacaagttgagtatcccttatccaaaatgcttgcaaccagaagtgttttggatttcaaattctttttcagattttagaatatttgcataatacttaccaggttgagcatccctaattcgaaaatccaaaatctagaacatataaggagctcaaacaactctttaaggaaaaaacataataatccaatttaaaaataggcaaaagatctgaatagacatttctcaaaataagatatacaggccaggcatggtggctcatgcctgtaatcccatcactttaggaggccgcggcaggcagatcacctgaggtcaggagtttgagaccaggttggccaacatggtaaaccccgtctctactaaaaatacaaaaatcagcagggagcgctggctcacactttgggaggctgaggcaggcagatcacaaggtcaggagtttgagaccagcctggccaacatggtgaaacctctctctactaaaaatgcaaaaattagccagacgtggtggctcacgcctgtaatcccaacacttagggaggccaaggcgggcggatcacaaggtcaggagattgagaccatcctggctaacacggagaaaccccatctctactaaaaatacaaaaaattagccggatgcggtggcggtcgcctgtagtctcagctactcgggaggctgaggcaggagaatggcgtgaacctgggaggcggagcttgcagtgagccaagattgcgccactgcactccagcctgggcgacagggcgagactccgtctcaaataataataataataataataataataataataataataataaaataaaataaaataaaataaaaatacaaaaattagccaggtgtggtgccagacgcctgtaatcccagctactcagaaggctgaaccaggaagtggagcttgcagtgagccgagatcacgccactgcactccagcctgggcaacagagcgagactccatctcaaaaaaaaaaagaaaagaaaacgtggtatgtatacacaatggagtactattcagccataaaaaataagatcctggccaggcacagtggctcacacctgtaatcccgatactttgagagaccgaggcaggtggatcacctgaggtcaggagttcgagaccagcctggccaacatggtaaaaccccgtctctaccaataatacaaaaattagctgggtgtggtggcacacacctgtaatcccagcatttggggaggcagaggagagcaggatagctcaagcccaggagtttgagatcagcctgggcaacatggcaaaaccctatctctacaaaaaaattagtcaggcatgggggtgtacaccagtagtcccagctacttgggaggctgaggcaggatgatcacttgagcccaggaaatcaaggttgcaatgagcaaagattgtgccactgcattccaacctgggctacaggagaccctgtcccaaaaaagaaaaaaatgaggtttcagtagcttctatgcaaggtgataactgcagagaactgagactcaactgaaaataggtgataaaacattttgttgtgctatttattaattaaaggacaaaagagcaagatgaaagaccactaatattttttgagctcccactacatgccaggtacaccattgtcacacctggcccacaggagatcttcaataaatgtttgttaaagggatgaatgaaaccccaaccttcattctgcaaaggaaatgaaagctcaggaagattcagtgattaagatcacattgtaagtactggcagagctggggcttgaacccacgtgagctgaccgattcaaatttactgctgcttaacaactcacccttacatttagtggctgaaaaccgcaatgtactatttgtcacaatcagggtagacaagatgcagatggtggttctgctggtcttgtttggggccttacatggctgcactgagatggtgacaggggctgggacacacaggatggcttcacccacacgtctatcttggccatttgtggaaactaactaccataggtggtatttcatgaccctgtaagcacccacaaattgcacctggttggatattctgccttagaaagatcattctggcagtagaaagtgccttgaaggggaaaccaaaggttttgtaaaaagtctactttggtggtgaagacctgagcctagacaggagcagtgcacccagcaaacagtccaagcggaaggcaaagatggtctactccaccacaggttgcagagatgccccctggataactggataacagtgtcaaggataacaggagtcctgtgttatcccactagagtcagactacaagtatcagggtgagatattttattgaagggatggagatgagaaaaccgaaggaaaccttttaatgttcataccacatccatatctgatcacaagcattggttatctcaccagcagaagcacttttcttcagccatctctgtaagtcagcaaactacttcatgacagctcctttgtaaccagaggacccaaatttttccagagtacgactggttaccttttggctcattgattgaccctcaggttttttatattctgatttaacacacaaaagtgtgttcatatagttacatatatatgtatatatgaaaaatatttgtgtacatatttctatatatgtatgtagagctgagacaaaagttttacaatgaacagcaccttactctaagcaacacactcttatttctattcgctttaatcctttttcttttttttttttttttttttttttttgacagagccttgctctgttgcccaggctagagtgcagcctctgcctcccgggttcaagcgattctccttcctcagcctcccgagtagctgggattacagacatgctccaccacgtccagctaatttttttattttttggtagagacggggtttcaccatgttggccaggctggtctcgaactcctgatcttaagtgatccgcctgcctcggcctcctaaagtgctggattatagcccacccaatcctatttttttaaatgctgtccattaatgcattctgacttcttgcttgaaaacccctggtttagtggataagcacctgtaactccaggaagattcaggattaagggcagaaataatgaagtaaattgaagtattagcattagtattttccattacattttggaatcgtctattttgatgtattcacgacggttaaaataatttaacatgctaatgtatggattaacttggcaattccattttaaaatattaaatggaataacgattctgactcgtaagtagacatgtgtaacagaattcaaccacatctgtaaaccatattgaaattatgagagtaagatttaccaaccacatttaggtttgacatattagatttgtgagtgaactatgtacttggattttgtcaagtaactcaatcgcttaacaaaataacaattaaatgtataaatgcagtttatagctatacattatttttaaaaatccccttcgaatgactctttaaaacataccaggggatacgctacttaagtataactaggttttggatttataacgttaatattaattattaaagcaaaactcatttctaaagagtcgcctgagtgcccaaaagacgccctcaaggacagggaagcagctgcgattcactcagcgatcaccagcgcccagaattcagggccgcccaagcggaggagcaacacgtggcccagcaaaaggagctgggtcccgtgcagcacagcaacaagaaactggcctaggaagacgctggagcgtctttctttcgcacgttactgcctgctacagtcatttaaaaaaaaaaaaccaaaaacaaaaaaaagaaataaattaatagtacgaagaaaactgcgcgagctacattcccagcagggtctgcgccagagcgcgccaggcaccgctcccgttacgggtgggaggaaaggatgcaccgcccacccggcgccggggaggctcgtccccgagtaggggacgggaacgcctgggtcccggggacgtggggcgcagggtctggggcccgaggccacggacgaagcgggaagccggctaggcagcggtctctgtctgggatggacgccgcgccccacgcggacctcccgccccgacttcacccagctctgctgcccgtaactcatatgacaagaacatcaggaaccggactattaccccgaaagggccttcccaagtcgtttcgccgcctgcagtgcccgaccgggggccgcgcgtccccggcaaccacgcccgcccgcgcagctgcagaggccggaaaaggcccgctcgcccgcgctcggcaccacccagcccgcgctccgggcgataccaccctgggcggcccctccaaaggccggagatggtgtcgtccccggcctccgattggtcgggggggcgggggcgtggcctctggagcctggttccgcgcgccggagcgcgctagccgcattgcgagccgaacccgggagctggcgccatggtgaggagtggttgcggggcgcgggcgacgcgacggtgggggtttcggcctgcgttcgggccgcagacagggcctgggcctgggcctgggcctgcgcctgcgcctgcgcctgccctgggaacgggttccggcagacgctgaggttgcgttgacgctcgcgccccggctcccgttccaggtgctgttgcacgtgctgtttgagcacgcggtcggctacgcgctgctggcgctgaaggaagtggaggagatcagtctgctgcagccgcaggtgggtgagatccgtgggctcctttggcggccccgcagaccctcatcgcgcgggtcccagcatgcacagcgcgctcccacgtggccggccgagcggttcggggcggggggacgggcctggaaagctctagatccgggggtctttaccttgacccatgggtagaatcgctctagcaattagaaataagcctcccggacgccgcccccgaacgattaaagcagaagctgggatgtggggcccaggtatcagcatattttaagagcttccaaggctgagaaccgctgcttgactgcgccgcagaggcaggagggagggaaggaaaccacttagcctctttctccccccaggtggaggagtctgtgctcaacctgggcaaattccacagcatcgttcgtctggtggccttttgtccctttgcctcatcccaggttgccttggaaaatgccaacgccgtgtctgaaggtaagtcggccaccgccaagtgtcacagagagatgtggttcctttcggtatcctctcgggcagcttgtgatagtatttgccgtccttggctggctctgagtctgataggcgtgaggcagtatttgagccatacaatgtgtaatttgaaataattgtcttcacagagctcaaggtctgggaactgtgctagaccaaactgtttaagcagacgatgtggaatgtgtgttaacgtttccttgtgggcactgtagtgacaaactattttttatttttattttttttgagatggagtctgtcccccaggctggagtgcagtggcaagatctgggctcactgcaacctctgcctccctggttcaggcgattctcctgcctcagcctcccgagtaactgggattacaggcctgtgccagccaccacacccggctaattttgtatttttggtagagacggggtttcaccatgttggccaggctagtctccatctcctgacctcgtgatccgcccgcctcgacctcccaaggtgctgaggttgcaggcgcgagcgacggtgcccggccgacaaaggggggtttcttaaagggggtcggcttaacacctacttgtgcctgaggttttgcctaaacacaatcaagtgtctggttctctgctttctgttcgattggaaagggcagttgggtaaacacaggctgagaaaaaaaggtttggttccagaaggcaaattctacgaaatactcgagggtgtgttacaagctattatttattgcccacttgtgctatcagacctgaatgcagttgttcccatggctgggccaggctttgcagtgatgacttgcgaatcaaatctgtcaatcccctgagtgcaatcactgatgtctccatgtctctgagcaatgcctgatggggagggatctaggtatgccatcccagcgtgctcggtgggaccagggtagtcagctgagggatgttagagttgatcgtccttcagcctgttagtgggaactgtgttctttcccctgaggggttgttcatgaggacctccgcctgctcttggagacccacctgccgtccaaaaagaagaaagtactcttgggagttggggatcccaagattggtgccgcaatacaggaggagttagggtacaactgccagactggaggagtcatagctgagatcctgcgaggtgagaccatcatctgttatattcctgttatcctggacattttgggggaggaggttctggaaacttggttgcttgttgtgatttctgggaaggccttcaggctgggctggtgcccgtgggtgcgggagctagctcagagccccttgttgctcaccgtcttgccctcttcttaggagttcgtctgcacttccacaatctggtgaagggtctgaccgatctgtcagcttgtaaagcacagctggggctgggacacagctattcccgtgccaaagttaagtttaatgtgaaccgggtggacaatatgatcatccagtccattagcctcctggaccagctggataaggacatcaataccttctctatgcgtgtcaggtaaagtgcaggggccacccataatactggagcctttggtctgtagttcagttaattttgagtcttgatgaggactgaccatcctgtgggtagaaccatgtgggctggggctgggtgtaggcctcctggtgcttaccacaggctgtgttcttacactgactgtatagaaagaggaggtagagtaaacctaccccatatacacctcagctcaggccctgtgcctggtctgtattgtgaatgggggaacatagaattgaggaagatttggatctttgtcccatttcctccaggcagagtaggtgtggagaaggcaaggctgtagctctatggtttttgatgaagcagctgggccagggagtgactgtggctctttgcagggagtggtacgggtatcactttccggagctggtgaagatcatcaacgacaatgccacatactgccgtcttgcccagtttattggaaaccgaagggaactgaatgaggacaagctggagaagctggaggagctgacaatggatggggccaaggctaaggctattctggatgcctcacggtcctccatgggtcagtgcagagcctggcaacctgcataaggtatggggctctaaatagctggcctcttgcattcacacttggtttttcctaggcatggacatatctgccattgacttgataaacatcgagagcttctccagtcgtgtggtgtctttatctgaataccgccagagcctacacacttacctgcgctccaagatgagccaagtagcccccagcctgtcagccctaattggggaagcggtgcgtcacaggggactcaaaaatgggagaataaggactgttgccatgtgcacctgcactgctgtatttcgtgacccaccatgtcttccctagttgtgcttgatggggaggtggggagcagggctgtcgtgcaactgggcaggtcagcagttcatttctctgactgcttccttgactctctctccaggtaggtgcacgtctcatcgcacatgctggcagcctcaccaacctggccaagtatccagcatccacagtgcagatccttggggctgaaaaggccctgttcaggtaccagtgagggcacctgcccacaatcaggtgccacttctggtgcccactgcttgttgggggatcacggtgatggctgaccagggctccctgacctatacaggcctctgctatgggggtgatggccagtcctggtgtctgagtgattcccagggcccagcaaagggaccaagtttccaggtcagcgacattggatgccttccctctgcctctgggagctatgggttggcatgcattggggtagagatccaatctggcctgaggctcactcaggacttcggggtgagaggaggggaggagctgagctgccttggctaatggggttgaaatttctgatcttaaactctccactgaatattctctcagagccctgaagacaaggggtaacactccaaaatatggactcattttccactccaccttcattggccgagcagctgccaagaacaaaggccgcatctcccgatacctggcaaacaaatgcagtattgcctcacgaatcgattgcttctctggtatgggtgggggggcgttggcaggtgtgagaaggggctgggtggctgggtggggaggcttgcaaccatagcttccacaatgatggcaatatttttcgtcaacagcagttcacctagtgagtgttgagactctgggtctgagtgaagctgagggtagagggaacacagggttggggtagtttctctctttgggctgacaggctttgtcacccacacacatccagaggtgcccacgagtgtattcggggagaagcttcgagaacaagttgaagagcgactgtccttctatgagactggagagataccacgaaagaatctggatgtcatgaaggaagcaatggttcaggtcagttgggctttgctgggtgtggagtggcatagctagctgttggaggtgatgaactgtctgagcctgaccttgtagaatggaggcaaaaaaactgatttaatgagcctgatccaataaagccagaaaggagtcctcagagcaccagaagtcttcaggcccttttagcacttttctttgaccaggcagaggaagcggctgctgagattactaggaagctggagaaacaggagaagaaacgcttaaagaaggaaaagaaacggctggctgcacttgccctcgcgtcttcagaaaacagcagtagtactccagaggagtgtgaggtcagtaggcagcacggccctggcagagatcctaggttgtaggattttcaacagcagaacaaaggatatgctgcatcaagctgtggtcttgagtccaggcttttggactgaaacaaggacctgaaacatctaaaactacctcttgattctataggaaggagataggtgctgaacttgctcaagagcccagagagctggttgtagctcacacccgttccctgggcatgtgtgttctgtcctcggctgcctcccaggagtcctcaacctggggtagtgtaaattcctgctctgcttattatcagacgtgtgtccggaggtggtcgtgtttcacagtggggatgggggcagggaggtccccaatgtgctaagctacaatcattctccctgagattttcatttagcacccagtttcttaaacagtgtttcagggccctgtctggaacttggcatgatggttctgttgcgaccagcatggtgggtgttttttaggtttttttttttaatgggctgaggtaatttctcatgacatgttttccttctaatttgggacagcctttggggtggatttctaaagttatacccacacaattaaactatcccagaaacactgggcaatgttaacgacacgcgttcccctgccttggctacttaattgctgaagatgtaatgagcactgttctcacagcctgttcccctgtccttccctttaggagatgagtgaaaaacccaaaaagaagaaaaagcaaaagccccaggaggttcctcaggagaatggaatggaagacccatctatctctttctccaaacccaagaaaaagaaatctttttccaaggaggagttgatgagtagcgatcttgaagagaccgctggcagcaccagtattcccaagaggaagaagtctacacccaaggaggaaacagttaatgaccctgaggaggcaggccacagaagtggctccaagaaaaagaggaaattctccaaagaggagccggtcagcagtgggcctgaagaggcggttggcaagagcagctccaagaagaagaaaaagttccataaagcatcccaggaagattagaatgcaaatggacattctctgggaggtggggcataccatagcccaaggtgacatttcccaccctgtgccgtgttccccaataaaaacaaattcacaagagttggttcatgttctttattgaacaccttacatgggtatggacagggcctatgggtggggcaaggcagcaatgacagcctcagtgaagtcatggcaagtagcatagccacccatgtcagaggttcgaacctgtgggggagaatcatcatcatccatgtggcctgggctccatcctaacaatccccatcaccacccaacagtctgtcccctaaggaagccggcccaaggacaacctaggctctacccagcaaggtgaccatggtccactgcttagaggcacaaggtctcttccctggtacactgcactgaagggtatggggagtgtggtccttgcaaggttggaagaaataaagggctctagctccctttagtctgcaggtgaccgatgacagacttgatgaagtcggttgtggtgctgtagccgcccatgtctcgagtccgcacctacagccaccaccggcaacagccgtggggagggagaaaagagagcccatgaagggaggtagggcaatgtgattgaggaaatggaagccaagaatgcgtgacagccagaaaaaaggcaatgcacaggaatggaaggaggagccaggatgggaagcacatggacctgccactcctcttaagccactattagctgtgctgcagccagggcaggacaggaggctgagcaggcaaagatgatgggaaacgcagatcagaggcaggatgtggctaccttccttggaagaaatagagacaagaccaggtggaaggaaagaatcacagcgaaaaggagatggggcgtgaaggtgaagctgatgcttcagcctgcctgtatcccttgctgttccacccccaaggagagctgcaagttctgcattcagatggcccatgaaaagggcagtggatggagcaggaaagagggaacagcagatgggatctaagaggcaaaagagatcaagaggatgaaacagccaagagaagggagatgaagaacagccctgagagggatgcagggatgtcagggagcagatgttctggggacctggggggaaaggagacccccattcaggttccccagagggtagtgccgaggtgctgacaccagaactactctaaatcctgaagccagcactactcttctcaactcaccttgccaactttgatcaccttcttcaccgcatctgcgatcatgctggagtgatactcaagactgtggatatggacaggaagaaactgtgactcccccaagacacctcccgctaatttccccacctgctcctcctcacgacacccaacctctgccgacagcctcccatgacctacttaagatgccgcagcatgttggaagccgacagcagcatggccgtgggattggctatattcctgcccactgcctgggcaaatgggtgccgggcaccctgtggagagaggggcaggctagacactgggaggaggcaggaggggtatgcagaggcttaggttggaaaaggacattatgggagggggagctcaggccagggtcactgaaaagaggcatggtgggcagcgtgggggaagaacaggccaagatcacttaggaagtggagatattgggatgggagaggaatggcggacttgaggtcagaggaagggccgagggagaaagcagcctcaccgtctcaaagactgcgtattctgcactatagctctcaccagggaccacaccagctcccccaaccaggccagcagccagattgtcaataatgttcccatagagattgggcatcacaagcacatcaaactggtaaggattctgcaccagctagagggtgagatgcaggcatgaagtaaattccactccccaccctcctcctccgccccatgagtagagatgtggggaggcctcacctgcatgcagcagttgtctatgatcattgtctcaaatttgattttggggtacagttcagcaacttcctcacagcactgcaggaacaacccatccccaagtttcctgtccatgggccaaaggggacagaatcagccaagaaagtacaggggctaccttcccaggaacccatcctacacaaagccatgcccctcacatgatgttggccttgtggacagcagtgaccttgccccgccccttcttggtggcatagtcaaaggcgaactttgcaatccgctgagacttggctcgtgtgacaatcttcaaacactcaatcacaccccttgcactctgggtaagaagaaagcagcagctaggtgacactgggaagggaaacaaggagctccacctctctcccatcttcatccttgccctcccccagtttctggggcctcacctcatgttccagagagctgtactccccttctgtctgctctcgaatgatcaccaggtctagattgttgtgccgagtcatatacccaggaagtgacttcacatggactacgttggcaaataagtccaacttacgcctgagggtgggcagggccatcagctctgctcctggtgccctggcacctctcaaccattcaccccacccagaccacctacctcagccgcatatcataggaggctagctcccccttatactccatcggggtatgaatctttcctgtgaaaacaaagtgggaaaaggagtgtcagccacaggccaagcccaagggaactcagaccagtgtctaacccccttaggaacatcatgtaacccagactcccatctcccattcccacatcagtaaacttttaaattgtctctgggggcaagggacaaaagagaataatgtagttaaagccagaaacatttcatctattgcattttctgtgtgtgtgtgtgtgtgtgtgtgtgcgtgtgtgagagacacagggtctcactctgtcgcccaggctggagtgcagtggcacgacctgggctcactgcaacctctgcctcccaggttcaagcaattctcctgcctcagcctccccagtagctgggattacaggcatgtgccaccacacctggctaattttttgtatttttagtagaggcagtgtctcaccatgttggccaggctggtctcaaactcctgacctcaagtgatccacccgccccggccttaatgctttatttttagtcaacatatttaatttatgttgaaacttcaaaacggagaacagattttttctatttatcaaaaaagagcctgggtttaacaacaagttgaaaaacaatgctagcagatctgtgatctttttatctgtgccttctccttatttgacattttttaacccaacacctactgatgaatatcaattatatgtcaggcaataaggataacaactaaaaccatacaactcctgcccttgagaagcaaacggtacactgggaaagacagaaaatatgaaagacatgataagtaccatgggaaacttgcatagcaacacaaagaggaaatcctctccagtaatatcaggatacagcacagaagagctggcacttcagccatgccttgagccccagaacctatgtatgtgaccttatttgggaaaagaggctttgcagatgtaattaagttaaggatcttgagaaaaaatcgtcccatccagggctaaatatttgaggagaaaaatgataccgagacagagagggaagaaaaccacagatattggagtgatgcatctacaagtcaaaaaacagcaagagccaccagaagaggcaagaaaggtttctcccctaaaccttcagagggagcagggccctgccaacaccttaatttcagactgatggcctccagcactgtgagagaatacatttctgttaatgataagccaccaggttcatggtagtgtgttacggcagctatgggaaactaatacagtgaatgagtgagaaggactctaacaggtagcaccaaagaaagaacgttctgggtggagggaacaatataagtcaggtagtacatatttggaatctaacacacaatctagtgtgattgaagcacagaacaagagttgtggaaccaaggcagaaaattaagggccaacttataaagtactgactttcctatggtaaggctgggcctggaaaatcaggctgttctttccaagaagagatatggaagatgaactataggggcagaactagaagccaaaaaaatcaaatgaggagattaaagcgcggaagacaaaagaaaaggggcagctaggcacggtggctcacgcctataatcgcagcagtttgggatgcagaggtgggtggatcacttgaggtcaagagttcgagaccagcctggccaacatggtaaaaccctctctctactaaaaatacaaaaattagcctgggcatggtggctcacacttgtaatcccagcactgtgggaggccaaggcgggcagatcacaaggtcaggagttcgagaccagcctgaccaacatggtgaaaccccatctctactaaaaatacaaaaattagccaggcatggtggcacgctcctgtaataccagccagctactcaggaggctgaggcaggagaatcacttgaacccgggaggcagaggttgcagtgagctgagatggcaacattgcactccagcctgggcgacagagcgagactctgtcttaaaacaaaacaaacacaaaaattagctgggtgtggtggtgcacacctgtagtcgcagctactcaggaggctgaggcaggagaattgcttgaaccagggacggggaggttgcagtgagccgagatcgcgccactgcactccagcctgggcgacagagcaagaagaaacaaagaggaaggaagggaggggaaaaaaaaaaaaagaaaaggggcagctaaaagtggtattccagaaatgcaatgaataagatttgatgacagttgatgtagcctcaggacagactcagaacccctggaacttttctgcatagacagctgacatgatctctcaactcctgggctcccaatgggaaggaacaaatgtccaaataccaatggtggttgccctggagttaatataattgcatagcatgtggggagaagggcttaataaacatttggtcatttgattttaaatggcacatggacaagtggcaagagggcacacataccaatgatggccactttgttctccttcatggaactcagcacctgctccagcttctcctcagatgccatattctgcacctcactcaggtggtgctcctggaactccactgggacagcggcagccttcagagacaggttcccaaaacatcacagtcaaggccaagtcctttccaacacactactgtcctctactgtctgatccccgaggccactcaccttgaacacctccttgacggcgtgcatcagctcaggccccacaccgtctcccggaagcatggtcacgggaaaggagccctccaccctcacgtcctcggcctcaattgggggaagaggggagaagtaaagatagagctggggcgggagcacggatcctgggagtagagaagtagggagacccgggaggggtggggaaaagccaggggagggagcagcgaggaagggacagggtcgtaagagagaccccagccagattcgtgcatacctggctccgcgatgcagcgtgcgccgcggccgaggtactcagacctctccatgccccagggttcccggcggagaccagcgcctgcaacagggacacacaagcctgtaaggtcagctttgagacatccagaccccgaacactacagttgactttgccctgtttaggaaaccctaggacaaactctccgctccttcgcccgcccctgcccgacatgtcccggggcctcactcgggtcagccagcggactccgctcaatgccgccatgtttcccgcaggaagtcgcgtgggaagtgacgcctgaagctggcgcggccccgtaccccgacttccggcctgtactgagttcctggtatttctctctctgcgccaaccagcactgcttgctcacgcctgtttctccttttccttgccggtggggaggtcatgggatgcgcaagcactttgtctcttgctttgttttcagtcgccatatttaatctacgtcgaaacttcaaaataacattagggggaaaaatgtagcgtcatgtttatcagacgaggacctgagcttaacaagcgattgagagaaaatccttgggaagctgttaaaatttgtgtgtcaatgcgtttgttattcttttaaccagtactcactgaatacctgtatgtcaggctctcgaggaatacagtacagacatgggaggtgtgtgtcgggtttctccgccagtctccgagagtgcccaggacctctgtattacccgtcgcctcgtagttttttcttacagggttttgttctttgctctgacagttatttccctaatagtgtgtcccggacttgaactccccaggacaggcccataactagtgtcagaaatgagttcaagcgtgtaagtgtgactaaagggaatttcagactgatccttaaagtaacaatcataaaaactaaaaaaagcctggacaacatagggagacctcgactctacaaaaaatttaaaaattagccaggcgtggtgacacacctgtagtcccagctacttaggaggctgaggtgggaggatcacttaagcccgggaggtggaagccgtagtgagccgtgatggcaccactgcactccagcctgggagacggggcgagacccgtctcaaaacaattacagtcacgatttttttttttttttttttgagacagagtctcgctctgtcgcccaggctggagtgcggtggtgcgatctcggctcactgcaagctccgcctcctgggttcaccccattctcctgcctcagcctcccgagtagcgcccgccatcacacctggctaatttttttttttttttttttttttttttgtatttttagtggagacggggtttcaccgtggtctcgatctcctgacgtcgtgatccgcccgcctcggcctcccaaagtgctgggattacaggcgtgagccaccaagcccggcctccagtcacgattttaggtgtgtacaattgacacacctaaagacaaactggtacaggaagatttgcctcacccgctcttctggaagtatggttttggatcacctatccagatggaccagagctcttgttaaaagtgcaggcttgtgagtcatacttcatttgctgaatccaaatctcagtgatgggggcccagaaaatatatctctaacaggctccccgttaatacacactgaaatttaagaaccactagctaggttctctgtgataagttcctccttcgtatatacctcaaccagccaaaaaggtggcaacgcaaaggcattcccagtgcttctattcttggggaatatgcataggctttgtgcctcctctgcaatcctttaggtgcgacattctcctatatagtagtaggatgagaagattaaactaggtaatgtgtaagagttttgaacaaatgaaaagtactgggtaaatatagagctgttattatagctaatataatattagtataacacactcctctatttccattcatatatcccatgaaaccaaccaaaaccagagagcaccaccgtcttgctcccatagactccctcgtcccagcttccacatcactattaatattcgtcactatttttcttctccaaatatttctccttctgactaagaaaaaaatggaagatttataacctctgcctcccgggttcaagcgattttcctgcctccgcctccctggtagctgggattacaggcacgcgccaccacacccggctaatttttgtatttttattagagacagggtttcaccatgttggccaggctggtcttgagctcctgacctcaggtgatctgccaccctcagcctcccaaagtgctgggattacaggcatgagccaccgcaccccgccaaatttactctttttaaaaaactacattttctgttacgtcaggaaatgtgggataagaaagaagagagatgtaccatcttaatccaatctctgataataatctaattttcttgagggtgactacatcatttccatccctaaattctgcacagacttgttccccacctaacactcaaaaaatatctgctaactgataaaacactaagtggccatcaccagggtgaaaggaactgatggaggttaccagtggacacaggccaaggagatgagaccattattgtctgaaggccactgtgttctccccatgaactcagcaagctctcctggccttcaagtccccatgagggcatctttgaccaatactgcctgataatggagaaatcctgtcaggacctttgaaaagtttcttaacctatctcctgggggatgggagggaggttataccatcttgttctcttctaactgttgtggagtctcctctgcttagcacaagaggctataatgatggatgagctgcctacacttgagtgttcagtgtgaagctgagtgacttgaatgtctgcttcccaggcctgcaaatcctccagcacaggagtcctgacttgggatctacagaaccccctaggtgtccatgaataggaatcagcactgtgaacctggatgggggaaaaaccaaaaatcacatctttattctcactaacctctaactgaagtttagcatttcctttcattatgaatgcaggtcacagattacagtgctgcctgtagtactcttgactttgtcaatcataaaaagtatagatattttcataccacattttagttgtagtagatctctcaaaatatcacttactttaatcctatttttacattatttgacccaatgctagattgtgttatttaatgaattaataaagcagcaaacatagtagtatgttacaaggtagcttttattccttttctccttttagagagatggtttcagtctgttccccaggctagggtgtgatcacggctcactgtaacctcaaactcctgggctcaggtgatcctcccacctcagcctcccaagtagctgggactacaggcatgcgccaccatgcctagctaatttttaaatattttgtagacatgaggtcttgctatgtcgcccaggcttgtcttaatcatatttgtcttgtaattctatttattttatatacttaaaagtctctttttttttttttttttggagacagagtcgctctgttgcccaggctgaagagcagtgggcgatctcagctgagtgcaagctccacctcccgggttcacaccattctcctgcctcagcctccggagtagctgggactacaggcgcccgccaccacgcccagctaatctttttgtatttttagtagagacagggtttcaccgtgttagccaggatagtctcgatctcttgacctcgtgatccacccgcctcggcctcccaaagtgctgggattacaggcatgagccactgcacccggcctaaaagcctcttctaagaaaggttccacaggcttcaccagccttccaaagaggtccgctgcacacaaaagtttcagaatttctggtgtattaggcctactggatctttttctgaaaccatgaacaatcaaaagagtaatataaccaatgacaattccttgaaaattaacgtctgaaaaagcttcttgggagaatttgatctgtgattgaaaggataaacagaattacagaggagaagtgattacactcagggaaaatggaaatgtaagcaaagctactgtttcagatcaactgccctagaagcagagcccaagacagggattctatgcaattgacctgttgaaggagtgctctcaggagaaacacatcagaaggtgaatgagcagaatatggaggggaaggagctcagcaagatgtggcctcagccagagtccacctcagccccatctcctggggagctctggagcattagtgacaactcaaggttgtcatgatttgagacaaggcttaacaaccctgctttgcccctgcatggcataggccagggccaatccttcagagaagggggaagctttgagccgttagtggcaaatacctgaagcaactgggggaatggatacaccagcttgccaagaggacctggccaaggcagacactaccttgcggaggtgacagtgaacatagcgtgctgacgaacagtgaggtgggcagatatatttgaggagatgagttatagtgaggattggtgagtaagtaggactggtgcatgttcaaggtccgagagaaacagagagagttttgtgagcaatactaagcaccctgttgaggttggtgaccatgaagtttattgtggtgcaattgtgtgtgatttcacggtgagagcaaaccaaaagtgagttcatccaaaagtgatattttgctagagagtggtacaagggagttgagagtgttggcaaaatgggatcaggaggcaagtgaagacagaagagatctaatcaacaggcagctgaggaaagaatcaaagacccccccaaaatattcaaagagtagtacttgtgggagttgttgagcaagtaacatgggaagagaggacgctgcttccaccagtggttttggaggtggagtagatgctggtgataatgaagtcccagataggaaatgggagtggatgccaaggagatctcaaggaccctgcagatgaggactcaaacccacaatattgatgaggcatccatgtcaccatgggagtcaacgaggatagtggcctcagctgaggcagggaaaagctgggatccaagtgacatagtcttctcttgataagcaagagagaccaggagatgagagatggcagagaatgagagaggtgatatcagttaccagaaagagcccctaaaaggcaacacttctttttttccattagttttaatatagaattttgctttagtacttttaattagataaccctcttttaaaaatatatattttttaaaatatatttttttcttaccataccaactcacagccccaatctttttgccctaacctcagaatcagttagttgtccgctttaaaacccttttcttacacacacacacacacacacacacagaatatatagtattgtttttggtgtatgagtgtgtgcgtcggaataaatggtttcatactctatatacttactgttttataatttaccttcttcactcaacactgtatctcagatgtcttagagatctaagacaccatatcttagagaatgagcagcctcattgttttattccgtaatatgaatttactaaatttattgggcctttttttttgagacagagtcttactctgtcactcaggctggagtgcaatggcacaaaatcggctcactgcaagctccgcctcctgggttcaagtgattctcttgcctcacgcccagataattttttgtatttttagtagagacagggtttcaccatgttggccaggctggtctcaaactcctgacctcaggtgagccacccgcctcggcctcccaaagtgctggaattacaagcatgagccaccgagcccggcctgagcctttcttaaattgatgatagtgtggtttctagtttgggccattatcagcaacattgctgtgtacatatctttatatcagggtgtccaatctttcagcttccctgggcccatattggaagaagaattgtcttgggccacacataaaatacactaacactaatggtagtcgatgagctaaaaaaaaaaaaaaaaaggaaaaaaaagctcgtgtattttacaaaagttttacggattcgtgttgggctgcattcaaagccgtcctgggccgtgggttggacaagtttactgtacatctttctttgtacacacgatgaatgtcacaaagagctcacaaagcacctgtaccatgtgtatgtttcagttatgaatatgttctgcaataaacagaaaactcattaaacaaatatgggttgtttttcccccctcacctctgaaggtaaggagttactgagaatggtttagcggcttggtgatgccccagggatccaggctgtcttcccttctgctctgccagccttagtgtgttgtctgatgtcctcatccttggtgcttcatagtcacaatatgactgctgttgctctggacatcacttctgcattcagagatggaaaagaagaaataacagtcccagccacaaccacttcttcttatcagaaatgtaaaaacattcccagaaggtttcttaggactcacaggccagaaccaaatccatgaccgctcctactgcaaggaagtctaggaaagagaggaatagatttgcctgattggcttaaacgaatacttcacatcctagctgcacattacaatcacctgggagctctaaaaaatacctatctgggcttcacctccagaggttttgatataattggtctgggatggggcctattcactgctgttttgaaaagctccatggatgactctaaaaactgaccagagttgagaaccactgggttccaccaatcatgatccttcatctagggctgggcaggtgtataagtgaggattatattcagttgcaagtgacaacatacaacataccaagcctaaacaagagaggagtttatttattgctcacataaaagttcagcaggctgagtgcagtggctcatttttgtaatctcagaactttgggaggctgaggcaagaggaagccaggaggtcaagaccaacctgggcaacataatgaaccctctacctctacaaaaattaaaaaaaaaaaattcagtgatcaatggtccagggctggaagggcctgcatggtgtcaaggcacagactcatgatcttgctggcccacctcccatggccttcattcccaaggtcattcaagatccaagatggttattccagctccagcattccaatggcaggaagaaggacagagaaatagaagagcagaggcccacagacctttactggcacttcccagaagttgcacacaccatttctgcttacctcccatgtgaaacagaagtgtgctggtcctttccttctaggctctaaattgtttcacaagacttcgtctacctcaagatgataagcatattctccaatattttgtctaatgctctcctagtgtggtgtatttatgtggtttcagtgattagtttatctgaagtttagttttacaaaagataaatgataaagccctaactttatgatttttccaaggctaattgcccagtatcattcattattttttcttccagataagtaattctaccaaagtattctgtcaaataccaaattcccacatatatattaggtcaagccaagtgaaactgctgatacctatcaccttgacccagctttattttctcaattataccagttactacgagacatcatattatgcatttctgcttttttttttcttttgagacagagtctcactctgtcgcccaggctggagtgcagtggcacgatctcagctcactgcaacctctgcctcccaggttcaagcaattctcctgcctcagcctcccaagtagctgggattatgggcatgcaccaccacacctggctaatttttgtatttttagtagagatgaagtttcaccatgttggccaggctggtcttgaactcctgacctcaagtgatccacccacctcagcctcccaaagtgctaggattacagtcatgagccatcacgtccagtctgtatttattcttaaagtatattattgcttgtgtttgcagggagcaaccttgaggaatgaggaactatcttcctaaagagcaggcttgcttattccctgctgtgaaaggggtgggttccccaagctcagtgttcccctagatgccacacaaacccacagcatccaccagggccctccacattgccccctggaggacaaggggacagggggacgagggagtcaatataaacatgctgcctaggctgcttgctgtgccttaataaagtcctttgtctctgactcgggagtctcatctttgccagcatgcatgaaacagtaagaggcgaattattcacacatcagcagggaaaattcaaatgccaggccctgacagttttggcaatgaggacaggctgctgataaacatgactttctggaagaggaaggataaggaccttatggaccagattaggggatatgaaaagactccttggcatatgttagtggatcctctcacccaaatggtgggtggcaggggtagggtggataggataaggagctcacactgtcctaccttaatgagtttaagcaacgagaggtagggttgaaacaagccactcaaacggtgcttcgtttcttgctcaggaggaggaagggatgttatgacaagggggcagcaagccccacagctgcactcaaaaggcaacatggatgtggctgctgagtcaaagaatccccaaagctgaaatacatggtatcagccatcatgtttgatacagagcttcacagtgaccccaaaacactacaaggtatttggataagccccacaggtggccactggaagccttgctcactggcacaggctcgctctctcccctgtgttccccaatccctctattcccgctctactccacctccggctgcttttatttaatttattaatttatttattgagatagggtcttgctctgtcacccaggctggagtgcagtggcatgatcacggctcattgcagcctcgaccttttgagctcaggtgatcctcccacttcagcctcgctaatagctggaaccacaggtgcacaccaccacacctggcttattttttgtagagccggggtttcgccatgttgctcaggctggtcttgaactcctgggctccagcgatccacctgccttggcctcccaaagtgctgggattacaggcgtgagccaccgtgtctggctcagctgttgtaatgaaaaagttgagtatgctggggaacttcacggaggcaaagtcctcaaaacttgtatatctctgttgggcccaagtgcccaattcaccatcttacctagttccgtggatgggtgcagagatggctgaaggcaccaccccaggactgcagtgtggactggggacaaaatgaaaggggcctcggggcttgggaactctctggatggacactggagctacacagaggaagcagcagcaatgccaaccctgaagccaggggccaaggagaaataaaagcctcctagctgcaccctgtgagctagcctgagctcccggcagctgttgcttttgctcctgatgtgcacacactaaacaccttggtttgttttcccagaaggtaaaaaatcccccaagttcaactgataggctttgagcaaagtttgcagtggaagaaggcaaattaagtaacgctccatgtggggcccttgggccaattcagtggctttcactgcaaatgtattactggtattgatgctcataccggcctgtactgccaatgcccataagtgtcagatgggattcgccctttcagagactgccacatgtggaaaggtggtttctgaaccctcttagatggtccaggagaaacagtttagactttcaagagggaggccaggtgcagtggctcatgcctgtaatcccagcattttgggaggctgaggctgggagatgacgaggtcaggtgtttgagaccagcctggccaacatggtgaaacctggtctctactaaaaatacaaaaagtagccggccgtggtggcgggcgcctgtgatcccagctactcaggaggctgaggtagaagaatcgcttcaacccaggaggaagaggttgtagtgagccgagatcgtgccactgcattccagcctgggcgacagagcaagactccatctgaaaaaaaaaaaaaaaaaatcaggaaggaaaagggaaatctgaaaattagtctcaaaggtggccagattactcagaggctgttctcaagcacaatagcaccacctgcctgacacactcaccaagcacatagctttaaaaaaattgtttagaggccaggtgcagtggctcacgcctgtaatcccagcactttgggaggccgaggcaggtggttcacctgaggtcaggagttcaagaccagcctgaccaatatggtgaaaccctgtctctactaaaaatacaaaaattagccgggcatgatggcatgcgcctgtagtctcagctactccggaggctgagataggagaattgcttgagcccaggaggcggaggttgtggtgagctgagatcacgtcactgcgttccagcctgggtgacagcgagactcggcctaaaaaaaaaaaaattgtttagagagtggttgctgatctgtcacccaggctagagtgcagtgacaccatcagagccccctgcagtcttgaattcctgggctcaagccatcctctcacctcactgtcctgagcagctggaacgacaactgtgagctaccatgcccggctaattttacaaaatttttcatagacgtggtctctcaggctggtcttaaactccttgccctcaggtgatccttccatcccaccacacctggccccatccctcccccatcccccttttttgtttgagacagtctctctctgtcgcccaggctggaatgcagtggcacaatcacagctcattgcagcctggaactcctgggctcaagcaatcctccccactcagcctcctgagtagcttggtgcctgccaccacgtaccatgccagctaattttaaaaatacatttttgtagagatgagatcttgctttgttcccaaggctggtcttgaactcctggcttcaagtgatcctccctccataatcccaaagccctgggactacaggcctgagccaccacatccggccccatcccctcttttttattttattttattttattttattttattttattttattttactttattttattaagacagagtcttgctctgtctccccggctgccaggctggagtgcagtggcatgatctcagctcactgcaacctccacctcccaggttcaagctattctcctgcctcagcttcccgagtaactgggactacaggcatgcgcaaccacacctggcttttttgtttggtggttgtttttaagtagagacagagtttcaccatgttggccaggctgatcttgaactcctgacctcaagcgacctgccctcctcggcctctcaaagtgctgggattacaggcatgaaacaccatgccaggcccccatcccctttttaaaaaggtgcccactaacttgttactgacccaaaaagttcctgtgactctccaaactgacactcccattttgggatgggtcaacttggatttggtggctactaagggaggggcacaaaaggcattattaatccaatggaaatactgtattcagtaacacagctggcctggtcctaatattagctgggttttacatgaaaaagtggcagcaaaaatcccttcaggggaaatcttttcctaacttcaccacttgaagcaaagctgctggctcaatggggccctcaagtcacagagggttccctaggcacctggcctggtacaatgatggtttggctaggctgacaccttatagtgtccacgttcaacctcagcaccagctatgcagaaccaaaaacaggcatgggctgggcgtggtggctcacgcctgtaatcccagcactttgggaggccgaggcgggtggatcacttgaggtcaggagttccagatcagcctggtcaacgtggtgaaaccccgtctctactaaaaatacaaaaattagccgggcgtggtggcgtgcatctgtaatcccagctacttgggaggctaggggaagagaattgcttgaactcaggaggcggaggttgcagtgagccgagatcgcgccattgcactccagtctaggcaacagagcgagactccatctcaaatttaaaaaaataataataaataataattttttaaaaaaagcaagcatgactgctccactcaatggacagagctcaagggagtgctgatagttctggccaatactccccgtgatgaacccttctacatttttactgccttttgtgtggttgccaatggcctagctatcttgcccacaagactggaagattaaagacattccctattgcagctgcatattgtggaaataatttcagctgccaatcagatgcccaagttactcacagagatgcccatggtaagggcccttctctaatgagacaaactgtagtcaagctgctgatccagacttcactgcccataccaccaccatcaccacctagatccgtcatcgaacaagacataacaacacattcaccatcgtggactgagcacaaaatcaaaaactgtttcaggccaggcgcagtgactcacacctgtaatcctagtactttgggaggccaaggcaggcggatcacttgacgtcaggagtttgagaccagcccggccaacatggtgaaaccccatctctactaaaactacaaaaagtagccaggtgtggtggcaggcgcctgtaatcccacctacttgggaggctgaggcaggagattcgcttgaacctggggggcagaagttgcagtgagccgagatcgcatcactgcacagtgagactctgtctcaaaaaacaataacaacaacaacaaaacaactatgtgtttctgatgcagaagacaccactacataccagagctgtggtgcctcccaaaatttgagccatttgtcttgcagggaaggaggccgcattgcacacagagtattgcccccagttgctcctggatgattgtccagatatcagatagctgaccccctccccaggctgtgtcattggtgcctcacttctgtcagaacgttttcaggttacaatgttgctgttcttgtctgttctagtctgaatagagtctggggccccagtcacactattttggcccctgaaactaagtcatgtcaagtttttggattctcagaccacctacagtctgacagtgatgcaccttttattgcaaaagccgcccaacaatgggccagtagtcaaagtattcgatggacatgctaggctccctaccatctgctagtatctggtattattgagcactggaatggcctcctccaaagcttctgactacctccatcaactccttctgggccacatacttcagcgaggcagtatgatcactgaatgcagctatctccaaagatcatctcctttcagccacttcctgggtactgatcaggatgaaaacaggtggagggttatatagatctattctgaaaagttgggagcatggtgcttcttttttctttcctctcccacccctaacccaacagcaaccccacaccagcctgcttggtgcaccctccaggtgtcagcccggcaaaaggggacttaggggattcaaacttatctctaattctggtttagccacttggattctcttgacagattaacctgatcccagatcagtgtactcattgaatacaattgcttgccaaattgagtacactggttgagtacattccttgccaagttctctcacactggctcatataggccaaggtgcgagatacaatggatgtctgtaaattttgtaaaaatgtccttgtctcactcacgcctcgctctagcagacaaaaggtctgggtatgagtagggaaagatcggagaaatgatgaagttatggctactggaatgagatatgctgctttcatagccaggaagcctgcgagaagacaccttagatgccagcaggtgcaaacagtggagaatgatcaatgtgctctttgtcccctagatccagcattgaaacctagaaaaaccatcatctcgttcatctgagttgagcagcagctgcagctgacagtcttaccctttctggatttatcatgctgcctgcatgctatgaaaacaggggaattcataaggaggtggccagtcctggctattcagttgtggcctttgccagccatcaatggcagctcccaaatatggaacctccccttaccccatacatgcacaaacacaccatccagcacaaccttgtttgtctgattggtacaaacacaggcacttttcctgtcacccacgtggctttggttcatgtatggtgtctgaggatgcaagcgttaggtgacaccatccatgtggctaaaccaaaccagtgtaatgataatccaaatcagaatcaacaacaaattctgaattcaagtaacacgtaacctgttgggtgtatgtttgtatgtgggccatgtgatgtctctccattagggatgagggttgcttttggcccatctatcacttcatataattactggcgatgacattgaggaccagtagattagtctagaactcacttatgcaggttgtaatggataatgacctggccttagactgtatcctggcctactaaggcctactgatccccttgagacttattcacaggtgactgagtctgagacgccgggtggcattgttgaagccaatactgttggttggcctcatcttgcttgaggttctattggtagtaaattctgtatgagacaaattgagcaaatttggtcccagtctagggtgatcagattgattggagtggcagatggagtggtatactcatgggaatattccactttggccaagaatgtgtaaggtcaattattgggagaggaaagctgtcagaggccctgaacgtcccagcacatttttactgagtatgccaagactacaaggccctgacccctctttcctgggctgtttctcagggtcgtgcattgcagtaagccaccttgaggaatgaggttaatatctctctccaggacaaagagcagacttgcttactgctgtctatgaaagagggggttccccaggctcaatgttcctcacgtggggcacaaacccagtgcatgcacagaatccataaggctccttcccattttccttgtggaacttagggaacaaggggagctgatacaaacagggtgcttttgctacttgctatgctgtgttaatatgctttgctttgtctctaatctaggaatctcctgtcttctgccagcattcatgaaacagtaacaaagtaacttatcttgaaaggagggcaaaatacaatccaagatatttatatgtagcaaagtgaaagagaataaacagtaactgctagagaatgccttaggcaaaaaggcatccttggatgttgtcttagttggctcaggttaccatcacaaaacgccatagactgggtggcttcaacaacagaaatttattttctcagagttctggaggctgggaagtcgcagatcaaggtaccagttgatttgggtcctggtgagggctgtcttcctggcttgcacatggtcactttctcattgtgtcctcacatagtggagattgagagttttagtgtcccttcctcttcacataagggcactagacctatcggatagggatccacccttatgacctttatcatttcagcctttatcacctcctcatagccttttttttttttttttttttttttttttttttttttgagacagtctcgctctgtcaccaggctggagtgcagtggcgtgatctcggctcactgcaacctccgcctcccaggttcaagtgattctcctgcctcagcctcctaagtagctgggactacaggtgcccgccaccacgcccggctaattttttgtatttatagtagagacagggtttcactgtgttagccaggatggtctcaatctcctggcctcatgatctgcccgcctcagcctcccaaagtgttgggattataggtgtaagccaccacgcccggcctcctcatagcctttatctccaaatacagttaattagggggttaggatttcaacatatgcatttaagggagacaaacattcattccataacaggtgtcattcaggtttcagttaaggctggtggtgagagaaagttttaaaagaaatgttgaaaatatgaggaagttggttaattttgcagaggggattcttttttttttttttttttgacctcaacctcccgagtagctgggactgcaggcatgtatcaccaggcctggctaatttgttggagcaacagagtttcaccatttggccaggctggtctaaaactcctgagctcaagcgatttgcctgccttggcctccagaagtgcttgcatctgtaagccactgccttacagatgggattctgaagggcatggcagatgttggaggtgaagtggtagaggataggtcagggccaaggagaaatagagcattatgggactgagtatgtggccagtgggatccacagtttcagagttgagagacaaaagcaggcatgagaagcataaaaaagttttaataagttagaactggctgggcgcggtggctcacgcctgtaatcccagcactttgggaggccgaggcgggtggatcacgaggtcaggagatcgagaccatcctggctaacatggtgaaaccccgtccctcctaaaaatacaaaaattagccagacattgtggcgggcgcctgtagtcccacttactcaggaggctgagagaggagactgccgtgaacctgggaggcggagcttgcagtgagctgagttcgcgccactgcactccagcctgggcgacagagcgagactccatctcaacaacaacaacaacaaaaaaagttaaaactattgaaagtttgtgctaggaatactacctaggaatgaaaacaaatgaattacactcttatacacaacaacgtggataaatctcacaggtaatgatgagtgaaagccagatatttaaaaactacataatgcatgatgtcatttacatgaacttcaagaatgagaaaaactagtttatggtgcaaggaatcaggagggggttacctcttgagcggcaagtgttcactgggagtaggcaccagagaggatttggggatgttgaaaatgccctgtatcttaatctgaatggttggttatatgggtgtatatgtgtgtaaaaatttaccaacatgcgcatgtaatatctgggtactttgctgtcaattatgtcataattttaaaaaggcaaataattttttaattaaaaacaaagatggatattgggccaaagtgatcatccacatacatcttgcccacataaaatgatcttaccagcaaaaagaacagctgggctggctgcaatggctcatgcctataatctcagcactttgggaggccagcgcagggggattatttgagcccacgagcttgaaaccaacttgggcaacttggcaagaccctgtcactacaaaaaaaactgttttgtttttttttcgagatggagttttgctcttgttgcctaggctggagcagaattatgcgatcttggttcactgcaacctccgcctcccaggttcaagtgattctcctgcctcggcctcccaagtagctgggattacaggtgcccaccaccaccccaggtaatttttttgtatttttaaagacagggtttcaccatgttggccaggctggtcttgaactcctcacctcagaggatccacctgcttcggcttcccaaagtgctgggattacaggcatgagccaccgctcctggcctataaaaatttttttagaaaatcagccaggtgtgatggtacacccctgtagtccaagctactcaggaggctgaggcaggaggatcgcttgagcccagaggtccaggctgcagtgagccaaaatcgagccactgcactccagtctgggcaaacagagtgagactctgcatttgaaaaaaaaaaaaggaagaaagaagggagaagaagggagaaggagaaggagaagaagaagaaagaagaagagaggggaagaaggggacgaaggggaagaagcggatgaaggggaagaaggggaagaaggagaagaaggggaagaagaaggggaagaaaagaagaagaagaagaggaagaggaagaagaagaagaggaagaagaagaggaagaagaagaggaagaagaagaggaagaagaggaagaagaagaggaagaagaggaagaagaagaagaagaagaagaagaagaagaagaagaagaagaagaagaagaagaagaagaggaagaggaagaagacagaatttcccatatacagcttggcacagaatatgggagtccgtcatccaacattttgttcaaataaagtaagaccctagtccttgagacccacacaggagtgtgctggaatcggattgctcaggctctgaagaggctatggtgtgtctctcctaacatgttcagtgatatcacattagtagtttgaaatcagccatggtaggaatgtgtagtcaccacaaattcagcaaatgctacaaagcaagtttattttttaagaggaggctgttaccagtatcacgctgttttggttactgtagccttgtagtatagtttgaagtcaggtagcgtgatgcctccagctttgttcttttggcttaagattgacttggcaatgcaggctcttttttggttccatatgaactttaaagtagttttttccaattctgtgaagaaagtcattggtagcttgatggggatggcattgaatctataaattaccttgggcagtatggccattttcacgatattgattcttcctatccatgagcatggaatgttcttccatttgtttgtatcctcttttatttcgttgagcagtggtttgtagttctccttgaagaggtcattcacatctcttgtaagttggattcctaggtattttattctctttgaagcagtagtgaatgggagttcactcatgatttggctctgtttgtctcttattggtgcataagaatgcttgtgatttttgcacattgattttgtatcctgagactttgctgaagttgcttatcagcttaaggagattttgggctgagacgatggggttttctagatatacaatcatgtcatctgcaaacagggacaatttgacttcctcttttcctaattgaataccgtttatttccttctcctgcctgattgccctggccagaacttccaatactatgttgaataggagtggtgagagagggcatccctgtcttgtgccagttttcagagggaatgcttccagtttttgtccattcagtatgatattggctgtgggtttgtcataaatagctcattattttgagatacgtcccatcaatacctaatttattgagagtttttagcatgaagagttgttgaattttgtcaaaagccttttctgcatctattcagataatcatgtggttttgtcgttggttctgtttatatgctggattatgtttattgatttggtaccaaaacagagatatagaccaatggaacagaacagagccctcagaaataatgccacacatctacaactatctgatctttgacaaacctgacaaaaacaagaaatggggaaaggattccctatttaataaatggtgctaggaaaactggctagccataggtagaaagctgaaactggaccccttccttataccttatacaaaaattaatttaagatggattaaagacttaaatgttagacctaaaaccataaaaaccctagaagaaaacctaggcaataccattcaggacataggcatgggcaaggacttcatgtctaaaacatcaaaagcaatggcaacaaaagccaaaattgacaactgggatctaattaaactaaagagcttctgcacagcaaaagaaactaccatcagagtgaacaggcaacctacagaatgggagaagatttttgcaatctactcatctgacaaagggctaatatccagaatctacaaagaactccaacaaatttacaagaaaaaaacaaacaaccccatcaaaaagtgggcaaaggatatgaacagacacttctcaaaagaagacatttatgcagccaacagacacatgaaaaaatgcccatcatcactggtcattagagaaatgcaaatcaaaaccacaatgagatactatctcacaccagttagaatggcaatcattaaaaagtcaggaaacaacagatgctggagaggatgtggagaaataggaacacttttacactgttggtgggactgtcaactagttcgaccattgtggaagtcagtgtggcaattcctcagggatctagaactagaaataccatttgacccagcaattctattactgggtatatacccaaaggaatataaatcatgctgctataaagacatatgcatgggtatgtttattgcggcactattcacaacagcaaagacttggaaccaacccaaatgtccaacaatgacagactggattaagaaaatgtggcatatatacactatggaatactatgcagccataaaaaaatgatgagttcatgtcctttgtagggacatggatgaagctggaaaccatcattctcagcaaactatcgcaaggacaaaaaaccaaacaccacatgttctcactcataggtggaaattgaacaatgagaacacatggacacaggaaggggaacatcacaccccggggcctgttgtggggtggggggagggatagcattaggagatatacctaatgtaaatgacaagttcatgggtgcagcacaccaacatggcacatgtatacatatgtaacaaacctgcacgttgtgcacatgtaccctagaacttaaagtataataaaaaaaaaaaaaagaggaagctgttaaccacttacggttgcatcacttggccaccagcacctcaggcttatccatgaagtaactacagctgagaataagtcagtaacttgcctactgagttcaggtctccagaccccaagtccggtgttctttccaccacatggcacattccaaggacctcgctcccccaggccaagcagccattgaaggttaaggaaagagagagcttaagacctctctccccaacaccaggaataggcctgggtgacacagcagagtagggataggtgacaagggataggtgtggggggctctttttatttttattttttaagacagagtctcgctctgtcacccaggctatagtgcagtggcgcaatatgggctcactgcaactttcacttcccaggttcaagcaattctcctgcctcagcctcctgagtagctggaactacaggtgcgtgccaccacacccagctaattttttgtatttttagtagaaacagggtttcaccatgttggccaggctgacctcaggtgatccacctgccttggcctctcaaagtggtgggattacaggcatgagctaccgcgcccggctgggagctcatctctttggggcaccctgtgggaccccacataggcaatccatcatgagtttctgacctctacctcccagacaagtattcatccacaaatatttatccttcaaggactattcacagcactatggatacagaaaagaagaaaagaatcaaacatcttcatctgtaagagctacaggccagtaaatgatagcacttttctattaagaaacgcatccctccccactgaacttgttttagtttaggtcttcattatctcttacctgaactgttcctacccaactccaggtcccaccagaagatctagattttgggagacctgaagcttatacaattggaggagtaactccttaagaagaatacaaaattatgaatacacaattatatgtaaccatgtgaacctgtcacgaggaatattcgagggtccttggaaggggccggtgtagatgaaagcctgaagattaagcctcatggagaatcagcctctgccaagtcctctccccacttcacccgggacaaggggaaaaatagctccctcctgcctaccctatattcccctcaccccctacccctaccgcaccctgctctacctcaaggataatagtttcctttcttctagacccccactcccccaccctcctcctacctccccagcaatttgggtttttgtttttgttttttgagacagtctcattctgttgcgcaggctggagtgcagtggcacgattggctcactgtaacagcctcttcctcctgggttcaagcacttctcatgctttttttttttttaaatattatgctcttgcttttttgcttttaatgtaatagtttaagtataaatatttgtccctagtatctatttggaaaatgaaataagctgcttaatgtctccaacaaagacagttatatatctttcccacttccacaggaaaacccaaggtgctgaacgcccagaatagcaaccttacacaggtatagtgttcaaaagtttgtaaaattgttttcctcgtgtttaattttatttcaccttcacaactgtgtgctatcattctcatttgatgggaaactgaggctcagtataagtttacaaatccagtgagtggcagagatgggattctgacttaagttcagcattttaggaaactcaaggcaggcgcggtggctcatgcctgtaatcccagcactttgggaggccagggtgggtggatcgcctgaggtcagaaggtggggaccagcctggccaacatggcgaaaccccgtctctactaaaaatacaaaaattagccaggcgtggtggcccactcctataatcccagctactcgggaggctgaggaaggagaatcacttgaacccgggaggtggaggttgcagtgaccctagctcgtgccactgcactccagcctgcgcgacgggagcgagactccatctcaaaaaaaaaaaaaaaaaagagactcaaacgtgatctagaataaacgcacctactgccaaccggatgttgggtcaagtgagaatgaagacaatgtagccatagtactgaagttcaatttacgccagtggcgagacattgatttaaaccaagtaacttgaactcaggtttgctccccatgtacttggaatttaactgcgctgagcttttacttatttatttcaagtactctatagtagttctgagcccctgcctcctgtgttgctgggactagaggcacatgccactgcacccggataatttttgttttctttgtattgtttttgtttcattttgtttgtttttttcagtagaagcgggtttttgccatgttggctgggctggtctcgatctcctggcctcaaatgatccaccctccttggcctcccaaagtgctgggattacaggcgtgagccaccgcgcctggccctccccaacaatttgaaaatgaatttgatcttgccccaccggtaaatatatatatatatgtgtgtgtgtgtgtgtgtatataatatttcaaaattgttgccattgcctatgagtagctaaggggcagccgtcagggatagtgttgggtgctgctgcagttttaggtttgagactgcagggaacagccgtgctctgcaaaatagcagggagtgggcatagcttgctgcactgggaaaacggtccccttcctcttcctcaatgggcattgagaccgggtgtctttgaagtggtttgtgattggcaggtgtgtgaacaaccaggaccaatgatcccagagcctggggataggagctcgactctcctgccaaagggtccaccacgatagctcctattgttttattattcaagattgaataactgggcctagatgtgggatggaatggatcctaaggcaagactaatacttgtggtgtggggttttcttgaagcaattgaagaggcctcaggaatcaacagcgaggaaggcccagagctggcgcatacctaccagaccaccttcttggatggcccttgtcattctggatttcttcatggaactatgagaattgccataattaatgcgcgctttagtttttgtattcctcctttcattttaattaccatcggggatctgacaggaagtggatccaagtgccggcatcacactctggggcctccggggggcgctatggcccaacacacagcgtggccaagcgcgcctcagcctaactcaccacttcctatctgttttatacggtttgcacccgcttaaggcggcggaggcgtgggggagttctgctgatgtaaaaaaaaaaaacattgttttatgactagacctacagaaaaaatgtccaaactccttagcatggcatgttaggcaccagcatgaccctcccggtgctgggtgctaaaacctccaccttgaaggaagtgcagcaaacccattcattccgctctgctagtccttacacaagctgctcccgggcccctcctcaccttcaggctcaggccctttttctgtgcttgtcccaggacttgctccgcttctgtaacagcccaggtcactccagagtgacattgagcattcatgagtctcctgccacctgactgtgagctcataagggcgccacctgggtttcattatctgctcactctctagcactggccactcacaaaaaagcccttctcgtggacatgagcacaatgaaagggtagaatgagacccaaggctctggcctaagggtttgtggtgagcccctgccagaaaagagtggcattctctgcaggcgtgcaccacgcttcctctgtcatcaccacccctgtagctctctgtggccacagttggagcacttcgccccaccccacccaccaaattcctttctcatggagaagatgcagcagttggaacgggacaatatacaaaggaactaagataaataatgcatggccggcacagtggctcacacctataatcccagcactttgggaggccaaggcatgaggatcacttgaggccaagagttcgagaccagcctgggcaacatagcaagacctctgtctcaaaaaaaaaaaatatatattagccaggcatggtggtgcacacctgcaatcccagctacttgagaggctaaggagggaggacttgagcccaggagtttgaggatgcagtgagctattatcgcgcgactgcactccagcctgggtgacagggtgagaccctgactctaaaaaaataaataaataaaaggttaaaaaataagataactaatgcaaaataaaagcgcacagagggttccaagaaacaacagactttcacctggatctaaagcagagacactcacctctgacccccaagtgctgccccagaactgctcattgaccttcctcccttcatcaccccttggttcagcagctctaacccaggagcccttctctggggctgcaggctctgggaagcctcaaacaccatcctggctggttttctgttccatgtggttaggatagaacagaaacccacgcaagttgggagtctgccccagctatgactgagccttaactcagtgccactttcctgggctgactgattccaccttctgcgcaggttaattctgagcatctatcccccaatctatcttggggacaaccttccagaatgaaaagcactccaaccaaatcacttcaaccatcacaaaaaggaatgctgcaaagtgagggcattccggcaggaagggccagccagcatgaaggctggagctgggagacagggagctgggtttgggaaacggtgtgatctcccatgctggataagcaagaaactcacacagcaagggagtggaggtaaggctggccggcaagagaaattggatagggcatcaaagggcctagaatgttcccaaactaagggcctaaatgtttatttgagaagccacaaaagacatttaagtttctaagcaggcgatggcccaatccaagcaacactttttaaaactgtggcaggaggatgggggtgtttgggggtgagcagctggggacgggagctaagggaggaggctgtgggcagaactgggaattccatatctgctccaagccagggtggagtccagtggaggaaaagtacgttttgctgttagatattctctgtgggcactggggtagggaggaaagggaagggggacccgttaagaccaaacaaacaggtagctgcaggacagggagagaaaagtattggagatgattcccaaactccaagcctggtgggcagcaggaggaggtgcccagcacagacacaggggagtcaggaagaagagctggctggtggagagtgaacctgtggagaccaagaagccccatcccagcctagggacagagcctcttgggatagggaccctccccggaggcaggtgctcctctcctctctgagggccaagcccagccctgtcctcacccactgatgttcaggactgacagaagtgagagtcccatatggggagaccatttcctcaaagatgttctctgagactgtggaggaacgtgaattctgtgaggggagaacagaagaagagcgccaggcacagcagcttgaggtgctcagagggcagaggagaaagacagtgtgctctggtcatcagggcagtttcccaggtgtgtgtaaatatatatacaccagatatatatatttcccaggtgtgtgtaaatacatacacatgcatatatatatgtgtatatatatatatatatatatatctggtcaccagggtggtttcccgtgtgtgtggggttggggggtggggtagcccactgctgccaggaggtcccaggccctgaagcccaagagagaccacggagtctgagagcagaagcaggaaggcagggctggaagggagccagcacacaagggccccaggagtggcttgctgggggccagtcaggcatccttggcagagcgttcctgtgaacggtctcagacacaggaggggcagaaattgaagaaggaggcgaggaggaggggacagttcttttaagaatggggagatctgagcagagaaaagaacatattgagacacaaacaggagatcggtggggtaatctcaggaaaggcagaagacaggactaagcaaaaaggttccacatccatctccacagtggaagaccgagagaagagaacgggtgaaaagacagaaacgaggaggagcatacgccgctgatggtgccagcagggttctgccaagattccctgagtcctctccactgggtaagaggaagggtgtctgctggaaatgagagagccagaggtgggtctgaatgttggggagaggagtggagcaagtgtggaacagctctgggggggcttctcacatgtaatgtgtgtacaggtcttggtaaattgcaggttccgattcagcaggtcccggcagggcctaagagtctggattcctcaccagctcccaggtgatgtcaatgctgctggtccggggaccacactgtgagaagcaagatttagagaggcagatcaggagatggagaaagagactggcttaagaattgtcttaaggagaaacccatgtttgataatcccacctagggtaaaagctgagacctgaaggagtcctggtgggaatggcagccccctgtgggtgatggggagaggcatagagagaaggggtggtaaagagaccaggaaaggaggtgagagggcctctgtgatggcaggagaaccagcagtgcccccaggacgcctcatctgggccaatgtgtgacagaacgctaactcacacttggaggccccccagaagaggatgggagtgagttggagcaggaaggtgttattgcaggggtgtctgagcgtgaacatggcaggcagggcaggtggcccccatgctgttctgcaggaaagtgctggactcagtctgggcttgctcgaagcctggccaggacaacgtggggagaggggcagaaatgtctctgccccacggtcaagggccagacgacttctgtgccaggaactaataaaaaaaaaggaatgggatctgagacgggacgcggctggggagaaacaggaggtgagctgggctctgagcctacctgtccaactcgcaatcagaaatcaggaggttcctgaaaggcacagatggaaactgaaaatgctttaggcttaggtaacccagcatcaggaatcgggatggttggatgcagggacctcgcccagcttgtctggggccgcagcctacggcagggacgtttcagtccttagctggggtgaaagtgaggtcagggtcgccggggaaatgcgggagtacagtcacgcgggagaaagacgtcaagagcgaaagctcggaggcgtcaaaatgagcagcaagtccaggcacaaggcgtcgggcgcggagagtacggcgggtgccgggggagggagatgaggccgcgaagacgccggggcttcgtccggcggcgacggggaggccgcggaggttcccgagcgcagcggggcgcgcacctcccgctcgggccgggctccctcgccgcgcggccccggatcctccctgcgcgggtttccgtggcccccgccgggctcttccgttccctcccgcggcctcgaccaggccgcagcccccagcccaggcgaccgactcgccagggtccgccccgccgccgcggcccgggcccggccgctcctcccccgatgatgtcacgtccccggccgcccctcggccggccgcgccgccccgcccccgcctcccccgggcccccgtcccctgggcccgcccgctcccgacatccctcctcccgcctgcgctccctcccttcggctaccgctcccccgggagcggcggcggcggcggcggcggcggcgggatggcccgggcccgaggccaggccccggggagcggcgggcggcggcggccgcggcggggcggcgcgggaaccgggccccggggggagtcggccgggctgctgctgctgctgctccaggtgctgccgcccggggctacggcagggccgggacgccggggcacgcggggcgctggcgctggcggcggcggcgtctgctggcccggcgcggccccagcctttccccgggacgcgcggctgctgctgctcctgccgccgctgccgccactgtcgccgccgccgccgagctccgcgcccgcagcctccgcctcccggatggtaatcagcgccccgcgctggcgccgcgggcgggcgggcgggcgggaggtgggggcggcgagggggaaagggcgggcggccccgcgcccccgccttgcccgaggcagctcccggggcgctcgggccccccctccgacgaccgcggccccgggcagccgccagagcgcgcctctggggcgcctccgcgcggaccgggtgcgggctccgctccccgccctccccgccccgctcgcagtccgcccgccagcgctcaggccgcgggggaatccctccatctccccgcccagcgccccaggaggggaggggacagcgccggcgcccgcggacccgctttctccgagggagcgcccaagaggcgagcgcgcactgagccacccggactcggcgctgcgctgctggaggcgcctggtgccgtcgggtcgggctgagctagacgcccgcagcctcagcgggaccggatccggggcggcgggggcgctcactcaccgcgcgccctcatgttccctgcgcaggacgctctgccccgcagcgggctgaacctgaaggaggagccgctgctgcccgccggcctgggctcagtgcgctcctggatgcagggcgcgggcatcctggacgccagcaccgcggcgcagaggtaagcgctcggaccggacccggtgcgctcgggttggacggctgcgcgccgcctcagctcagcttgctggagctgctggagccaggggcggaaggagccctaactctggacggtcccggcgagctccccggcccaccccgtccggagtgcctgtgctgcctcctgaggctgtggggcgggctggggcggggcttctgcctccactccgggctgccccggtagatttctgacggccgctcgcgggtgcggcggtgaacgccaccccagccgggctgtctatggctctgagagaagaggcagagctcccagccatgacccacagccaccggccgtctaggaacgtccagcccctccttcctgggcagtcccagtgactctccttgtccaattccgcagctctctgtcaggaaaggcacgaaacccagccccctttttcctttcccacgcccctcagagttggcggatgggggtgtgcagagccagagaagcggctgggggctggacggtggcgaagagatgaggtgggcagtcggcctggctggactgattggcctgggaactgggcagggcccctgcctttccctcgggtgtttttctggtaggtcctttggaaggcagagagtccctgggaacccagcacccgcgccggtctcctctgactcctttgcaggggtctgggagtctcagtagggggttgactccaggatttgaaagcgaactttaaaagtttattgacctgcccccaaagcccctgcaccccctggctttttgcaccttcagctgtgaccatggagggaggcatttaggtatcctatggggagtcacagtggttaggattagggaggtgccagctctgctgacagctgggacagggtgggcacttggcttcccagaagtctgagctgttgcagcagcccgaagggattctgaatggggggcttaatgcagaccgggcctgacacaggagcccacattcacactccgcaggacgcctcaacctcaccgtgtaacagacacacaccgcgcttcatgtgcaaactgaagccgtttctgcacgccggtcctttcctggctgtcgggagggaacgctggggggctctggagctgatctcttacggaagagaaagggtcttgtggatgaattaatttccaaaacttttacaagggatatagctatattctagaaaaattggaaaataaaaaatttagtccctcctctgtaatacaactactgtcaacattttagtgtatttccttcctatttttcttcccattaacttgtgttttcctgtgctatgcttacaattccacctcctgcctattcttctgttggttctggcttttttttttttcaacttgagaaggttagtttcttaacatggccccctctttggccccaccacctgctgtgtggcgagagctctttgtaagagtgggtgaggagtgctgatgggggcctctgggagttaaggttccatttctctgcaacctttccctctgtgcctacccagaggcaggtctgatgaaggggaagcagacgtgaaggaggcagtgcccttggagactgcgtggggttcaagaagtgtggggataaggcttcccccagagcatgggccacagcagtggtgtctgcgcatagtggggttgagtgggcttggggtgtccagtctgactccccacattgtgagggccacattgctgggatgcagagggcttccgcaatgtgaacaggggctttcttcaggctcggtctgctaatccccaagtgtggagacttctctgtctcaggacatagactaggagcccccactcgctttgttgttcagctgactttcctccctgtcccagagggagctgcctcatccttcctccccactcttccccgtgttgtctgtcatcactacagttgtatctggttcctcagtcagtcctctgcacgggtcttctcatcccaaaacagcaacaatgaaaattcctccccctggccctgcctccgccttcatcacggcctggtttctctccctctcatctctgagaaactttcacggaagtgctctcccaaaagactccctgggatccgagagttggctttgacaccttcctcagcctcaccccacagttgcctgattgtcaaggcttaggaatgttcttttccgtgtcctagtcccaatctcagtgccctcagccaccacttttagcaatgaaaccccctggccctccacccgcttcctccctggcttgaaggttaactgcaccctggttaccacctcagcctcctggcccagtgcctagccccagccattcaccactcccctaaaaccatcttccctgcattggggaccaaagcagtatttccaaagtacttttttaagatcatgtctctctccgattacaaataaagtgaccaggctgggcgcggtggctcacgcctgtaattccagcactttgggaggccaaggtgggcgtttcacttgaggccaggagttcgagaccagcctagccaacatggtgaaaccctgtctctactaataatacaaaaattagctgggcgtggtgaagcatgcttgtagtgccagctacttgggaggctgaggtgggaggattgcttgagcccgggaggcagaggcttcggtgagccaagatcgcaccactgtactccagcctgggcggcagagtgaaactgtgcctcaaaaataaataagtaaataaataaaataaaataaaataaagtgaccaacccccaagccccactgcttcctcatggatatctccaacattcaaggcctatcatggtctgactccagccttcctccccagcctcctctgcatgatgcttggcaggcagtggatacttggagaattagctgcgcctccagtaagtgctatggtctattgaaacaatccctctgccctcagcacccgcacatcccctggattaagtctcaccagcctcaggactccctcttacacccaccgaccccagcaactgctctttctgtgccctcccaccctgcccacgggagtggctttaatgctgcctacgaatgcttaccataggccagcatctgctctcctctgcctgtcccggtcctccttgccctgccagctggggccttcccctaaggcaagggtagcggtccgttcatccttgtgtccacagcacccagggcaggctcaggcagtccatgggggatgggggtgatgactgtctgccggaggaagcagtaatgtttctcagaggctcccaagtccccttatattggttcccctcttgactttggaagactccaggttctacctgacccaggaatcagctactggagcagcttctcctgcccagttctacagcttgacttttacaacaatgccaagattttacagaaggtgggtggggaggaaaaggcccagaaggcctgctaagatcagcgagggaggctctgccaacaggaaggaaagttctgagcaaaagaggggtagggagggccgggtgcgatggctcacgcctgtaatcccagcactttgggaggccgaggcaggcagatcacgaggtcaggagatcgagaccatcctggctaacacggtgaaaccccgtctctactaaaaatacaaaaaattagccgggcgtggtggcgggcgcctgtagtcccagctactcaggaggctgaggcaggagaatggcgtgaacccgggaggcggagcttgcagtgagccgagatcgcgccactgcactccagcctgggtgacagagcgagactctgtctcaaaaaaaaaaagaaagaaagaaaaagggggtagggagagcagaggggctgcatacccttaaactggaggcaatggggatgggaacgctggtggagagggctgccctctccctaccaatgtcttcctaccagggaagtctgcacaaggaccccctgcccctgccctgagccaacaggacgttatctctgagatccatttgcccagccccagcccatcttcccctgactcccctgaagactcaagtcctcctgctggcacactcagcacagaagtagctctcttctccttctgatgtgcttcccagtctggggagacctctggaaggcccaggccagacctccccctggagctgatccctgcacactagcagggccccggagagggaggccagctggggctgcctttcctgtaagcagctgcaggctagcatccctgctaggaaatgcttttgtttgctttaataattcatagccgattctcagcctgggacctggcaggcaggcctgtgggtgggtggcgagagggtgggcagagagcagtggagtggggagtctttaggtagaattgagggccaaaagaagagggggagagcaggcctgtgagattcttccccctccctttcccctgccctcagggactttggtcactgtgccaatttcctggggcaggtgagcagggcagctgctgggggcagtgggaagaggggatagggaccctccccagacccaaacctcatctccagcaggaccaactggacacaggctctgggcagctgcctgcagccaccaggtcctccctgtgcaagcattgttgaggtgggtgtgccccactgggctactgcttttatcttccccagtctgcaccatggccaggggctggcatgtcaggggctgggcagggccaggccaatagatcttgtctggggcaggagggccaggcccagcttgatcatcatcagcagtcccggggtccagagggtgcctgcaggggagagcaggggccaatgggatgcttggaggaaggggggatgtagaggaaagggactggtggagccctgtcaggatggggctaagaagagctggacttagcagagagagactttggggaaatctgcgaaaagggatgagatgcaggagtttttgctccctccacttcctggggtgatgggtgtcaacaaagagcctccccccattactgatgaaagtagggcttgtcccccgtagccctagcatcccagactcaaagacaaattaggaccagggcaaggcacggctcaaaaccttgagttatcaaggcagccaggagttaggttttggtggggagaagggaaggcaagacgcctgggggtgcctctgagaggaggccgaggctccagccttggtcacttgtcctctgtgggatttgagctggctgtggttaaattgcttactataacaagcatgcagtcaaggatgtgaagagccgtgagtggccttgggaagagagaacagagactgtgaggggggctttgtctgtaccagacagttatgctgtggcaggggagagcagctgccgcgaaaagggccctggagtgtcctgctcagccttgcaaaggagcatctcccgggacctgctgggcagccccagcaatagcagtcagacacctctgcagctgctggcatctccccacaggcatctgcatacactctggagcacagtccacctgaatgacctagtctgtgaaggtcaggttgcccttggtgttgacttgaacctggattcccaacagtgctcaggaagtccatgcacacccatgctcactacaaagcatgttgactctgaccaaaatgcatctgtgcaacgtaaatcttttttggtgtctcaaacagtctcctttaattttcggtctatttaagaatgaaagatggaaaggaggtgagtggggcacaatgaaaatacaaaagcgagcatattctcttcccaaatctgggttctttagtacgggggcaaatgtcccactgcctcaggacactctggagttgagaagaaagtgttttgaacattgtgctttaaacaatctttttaagaaagcgaggaaatgtataattcattttgcagtcttgcagaagtggttaatgtggctgattttgtcactcagctgcatttctctggaaaaggcgtttatgtggcatggtttgttcactaatgatgctaagtgaataagctgtttctgaattatgggtgccagcagtacatgtgccaggtgaggcagttcttacttgtatttgtcataaactgatacctgccaagctgcactcaggcccttggggctgtagctttgctggcatccatcgtaccccaggcctctgaatggctggcagttggtacccacccacatcccctcaggaccattggtcaaggctctgcctcccctgctgttagctgcttccctttgcttgaggacttgctcaggctgccagagcctgctctgctcagcccagaagtacctgagaagtaacagccgtagaagccctccaccagtgactgactggagttggtggataaataccccagctccctcacccatccctctggtgggataatgctgaggcacacattccatgctgtttccagagttccccgtgggatggagctccaggtgcctacagtggggacttgaaaatgcaccctctataggctgctttctcatctttgtctcacccccaacccccagtgtttccgaatcactgcccagataacactgttggtatttgcatccttgtccccaggtctgcttctcggggaacccaaataaaatacttgcctctccaggcttcagaggctctattcccccttctctccccctttctttcttttaaattaaggatacatatcaaaagacatacgtgcagtttctctccacaccccaatgtttgtcttaggcagcgccactttggagcggcaccatgagatcaaagactttggccttggtccacatctctctgtctctaagccagtctgagagcagacagtggcccccacatcccacctgtgtccccacacatctgcacccaggatgtgctcatcaggggccctcagaccactcagcacctcctgagctgtttgagtctctatccctgtttctttttttctgttctttagtccgggtttgttttctcattacaagagcatcagcttgtaatcagcttgtaatctccccttccccttccccagccctctctctttggaacttgcatttccattctacaagtgttgattggtcacctcctgcatgttggggtcaatcaggagaaggaggcaccgtccacacctgcctctgttgctctcgagtcctattccccgcaacatgctgttcctcgtgtccttctccgtctcttgttcataggaagtatcctttgcttgagcttctccaagcctggcagggctatgaacagggtgagccggagacattcccaggcaaggggcagccccatgtgcgctgcagggctcttgcccactctgcagtcctcctctggttggaaggggcgggggccgtcattaacactgccctgttgttgtccatggcacggatcttgtcctgcagctgtaaactaaccagtgctgctccatgggtgggtgtgagcctgggaggatgagtgtgcctcagacccactgagccgtgctggggaagtgcaggatgccgctctgggctgcctcggggcagtggactgatcctaaacctactatggggcagggcacaggcatgcaaagcagggcagcccctccatgcccccagctggcaggagacactggcccagagaccccaggggaacctgctgtcttcccccctcccaggtccctgtgcccttgctcctgtgtaatcccctcctgcagggatgctgagccctgggaaggaagcttggcttggggcttatgccagacttcccaggtctggtcctcagcagcctggcaggagctggggggcagccaggacccagcaatggctgatatttgggtgggacaggaagctcaggccagcatctgtgatttatgctgcaccagtctggaatttggcctgagcacttgcagggtgtctgtgtagaaagggcatgtccagtggtctgggagattccgttatttctcagcacccaccactcctctggcaaggcttccttttctctctatagcctccctccccactgcctgagagccttccaggccccttcgctgggctagatgacaggatataaaagccacagggacctgggagtgcttcacaaacccatctcctctggccttctctcccactaggtggtcctggaacccatccccagtggagttcaagttaagctggtcctgggagcaggagggaggagctcagggttgaggcctcattagcatattcatcaacagtaatcagggccccgctgtgatcgaaagccctcttagggcttccctgcctcttgctggctggggagcgggtgaggggcgatcaaggcctcaacttgaaaggactgcagcctgagggcaagggggtggagggagcagggaaagatggagggacagtgaattccctagggaaaggagcatctgtaaaaagaatctgtggtcagaaagaaaggtgttgaggccgggcgcagtggctcaagactataatcccagcactttgggaggccaaggcaggaggatcgcttgagcccaggagttcaagatcagcctggataacacagtgagaccccatctctccaaaattaattagctgggcatggtggctcatgcctgtagtcccagctactcggacggctgaggtgggaggatcacgtgagcctaggaggttgaggctgcagtgagctataattgtgccaccgcactccagcctgggtgacagagcaagatcctgtctcaaaaaaaaaaaaaagatactggaggtcccctcccctcatcttgatcagggacaagaagacttatggcttctgcctcctaagtcagcatttcatgtggataactgagggaggctccggggcaagctttcaagaggaggaaacattttccattttactatttattataacttgtatgtgtaaaacaatagcaagtccctcatgcccatgacatcccaggtgttatggcttagcctgaagccaagtaaaagaataaattgatttaaagttatatgaagaaaaatagtaagtagtggtgactgtggcagccattgtcacaggagcatgctcatgatgggcacctggacaagctgacctaagtggtcctcaaggcagttccccatcctggtcactcccctgcatccctgcagcagcctctctcttgtcccccacactgcaccctcctttcccccatagcatctttaagccctgcctggcttcagaactttctagtggcctttagtcatgtttccgaaaccatgaccctcaacaaaagtgctccgtagtcaggtaagcagggtgtgttagttggccaggtgtagtggttggcacctgtaatcccagcactttgggaggccaagatgggagaaagctggagcccagaagttcaagtccagcctcatctctacaaaaagtaaacaaaattatccaggcatggtggtgcatgcctgtagtcccagctagtcaggaggctgaggtgggaggattgcctgagtcccagaggttgaggctacagtgagctgagatcacaccactgcactccagcctggacaacagagcaagaccctgtcttaaaaaaaaaaaaaaaaaaaaaaagttactccaagctgagtatggtggctcacacctgtaatcccagctctttgggaggctgaggcaggaggatcgcttaagtctaggagttcaaggttgcagtgagctatgatcacgccactgcactccagcccggatgacagagcaaaaccctgtctcaaaaaaaagtattccaggttgggcatggtggctcatgcctgtaatcacagcactttgggagtccaaggcagaaggatcatttagccgggtgtggaggcatgcacctgtagtcacacctacttggaggactgaggcagcgggatcatttgagttagtaggtcgaagctgcagtgagctgtgattgcagcctgcactccagcctgcgtgacagagtgagatcctgccttgaagaaaaaaaggcggggcaggtcttgagcccaagtcttcaaatttgtatctaaaaagaaaaaaaaaaccgactccaaaacttagcaacttaaaacaacaaacatttattatctcacacaatttctgaggtcagaataagggagcagactagcctggtggttctggatcagggcctctcatgaggctgcagcaagatgagagctggggccgcagtcgtctgaaggattgactgaggcgggtggatctgcttccaaggtcgctcatgctggcaagtcagggctggctatcggcaggaggcctcagttattctccctgtggacctctccatagggctacttgagtgtcatcaagacatggcagctggcttccccctgaatcactaatccaaaaaagggaagaagtcagaagctgcagtgcttttatgatctaaccttggaagttatatgctattactcctgccatagtctattgacctcacaggccaatcccaacacaatacaagagggggctaactaagggcatgaatcccagggggtggggctcactgggaaccatcttgtaggctggcttccacacatgcagagcaccagccctagccaactcaagcagggtacattcctggagggtgtcctaggggcccccaaatacacccatgtctgtggccacagcacccttttctaaagggaggctctggagccatgagagatctaaggaacacactttggaaggccgtggctcagagaagagaatctaaccccttcccctggtgtctgtgtccttccatgatctggcacgaacttccagtacaaactttcctcctttcacttcgctttttgacacctgcggtacagcagcagcctctacacatccagccattccttgtgctgtttattctgccctttttcttgttcatctgttgagctcctgtttattcctcaaggacttaggggaaagccaccattccatgaagccttcccttcatctcccataaaaagaattaatattttcttcctttgcttctccagtttttttgcatggacatctttggggggcacctgcccctttgtctgatgttgtacctctctctctgtctcccctcttccaggcatttgctcctagccccagttgttgccatgtgtccagtgcttggtgtatcactgggatgcaggggatatttggggaagagggaatgccttcctcctgctctcactctggccttgcttctgggcatggtttctgatgagccaggagagatcccttagcaaggccagaagagaagttcctcctgcccaagggagcctgtggttgtctctcccaaagcctggaggcaggttcctctacactttgggggtgctccctaccttcagccagggcccaggccaggcagactagtggtcctgagccagtttgatgcctccaagggtctgatggacatcgccattccccaggcaacaccacaggctcatgacagcctcagcctgggctggggtttagtgggatatttgttctagggcccccggggtctccttgaagccctaaagggcagtcacaagagcctctggtcagaaagacagattggttcatacttttgatttttgagactggccttgcaaaatgtgctgcccagggaaaagcctgggagggagactgacagggcctcctcctttgcagtcaccactctgcctcttgttttccagggggcaggctggggtgccctaggtgctgagagacctctatctggaagcgagatggccctggtcaggctggaaagggcctgtctagttggattttttgcccaaactcttggcatcttggagccatgtcctggctagcatgcctgcctggcccgaggcgctggagtctttctcactggggggccttccagtggttttccagctcttttcctcccacagtggcgtgggtctggcacgagcacattttgagaagcagcctccctccaacctcaggaaatccaacttcttccacttcgtgctggccatgtacgaccggcaggggcagcccgtggaggtggagcgcacagccttcatcgacttcgtggaaaaggaccgagtgagaggctcatgggcttggctgggactggccccgggagggaacccccaaccacacacacacacacacacacacacacacacacacacacacacacacacacactgggacagatgaatggatggaagctggctgagtggctggaagggtgggaaagaagttggggttaggagaaggggtggacaagggaggctggaggatccctgagcacccgagcatcctcccatcttgtccctgcaggagcccggggcggaaaagactaacaatgggatccattaccgcctccggctggtgtataacaatggtgagtggaggcccctgccctacccagccctgcccctgaagtctgggcactgcagcatcatgcgacacctaatgccccctgtgccagggctggggagggtgtgatgtggtctggtcattgaggctgcacatgctcccccagcagcaagccctctccatcttcccatcctaggactgcggacagagcaagacctctacgtgcgtctcatcgactccatgtccaaacaggtgagtcagcgcagagggtgctgaggcccatctcactctcttcccggaccctgcctccccctggtctgagtgagcctccttgttcctgccctcatctccctatgccctccgtccccatcagcctagctcccccagttcccaccccagcctgtgccggagggtgtgtggcttttgccctctgttctagaaaagacaatatttgtacaaaaaccctggcttgggtcatgtttcctagcagcccagccttagatgggaactcaggtgcaggtagtttatttggggagatgggaggggctcctaggagcaggggagggaggtaagctggacagaaaactgcacagggagctctggagaaggaatggcaccagaagtgtcccccctcgaagcaagtaccaggattttgcaccccgtatcaattagtcattggctgggaaccactcctaagggtagcacgtaacctctgagacattttcagaccaggcagttcctgtccactgagagcagttctcaggaggaagccctctgcagctgacatcagccacagccacgggaaggtgcacatttccagtaaaggggatgtgggcacagccctgggaatttccactgcagacccttgcaccttgctgatgtgacggttacgggaaggaggctcagaggccagcacaaggagctggaggaaactgaaacctgaacaggctctgatggattctgccaacacagggccccaaatctcagggcttttcagagaagctgtgcatgctggcaaggagggggctgagtctcaaatgggccagattagtgggctaggaatgcaagctggagatctgggcttcctacataggcagggtcttttggcagcctccacccaatcccagggcagagggaagaatggtttgtttctagaatacccatggccactgggctgggggaggcaggccaggcagtgcctagtggaactgtcaaggggacgggtgtggaaggggttcgaggaagtccacagagagagggatcccacaaatgggggaaggcacagagggttataaactaggaaggcagatttgcagttaggaagctcacttcttgcttctgggcagagggaggctggaagactggtgaggaggtgatgcagcagtcccaggggaagaccgagcctgggctagggatggtatgggggaagaggcgatagttatctagggggaagaggcagctgtgcagccctcggagctgactgggctggcagggatagctgagaaggacaacactcatcaacagaagcagaggtccgtcaggacatggaggatgcacacaggaggatgctgggggaggggaggggcctggtgctgggtgggcacaggagtatgtctaccccaccagccacctgacctttgtcctggcaccctgaggaaccccctgccccaagcagagccagctctggaaagagccacctacagacagacagaatctgcagacttcataccattcttgccagccggtggtggtccggtttgggaggaggggttatcccccgcctgggcagcccagagcaaggcagagggcgtgctcttccctggggcagggtctccctgggcctaggcttgggagatgccaggtccgtctgtgctgccacctgcacctcagaggagcctccttcccctccagcctgtgcacctccctctccccaggccatcatctatgaggggcaggacaagaaccccgaaatgtgccgagtgctgctcacccatgagatcatgtgcaggtgagatggccatgtcactcacacctcacccctctgccaaggcgtttctgaggactctacccaggccctgccccctcgccgcccttgcccctggctgctctctgctgctgctccctggagaagcctggtggcaggtgatgaagggagtggtgaggcccctgggcacagcgctggctgaggagagggtccttgaggccccattagcctggcctgtttatgtggcttctccgagtgtttttgtaagagaggcctcctgctgccactgggaagcttagctaataaagctcaggggagggctgctggggttgcgggaacagggtctgggaaggcctctgggattagctcagaagctaatctttgaggaaattttgaatcctagggcagctctctggcagggcagggtgggagtgaaggggtgcacagcccttggctcccttttccccattatcccagagcttggcatttctagtaaggtctccccaagagatgccagtcgtacagggtcctcggaggcagttcctgatgcatggaaaagagaacagggttctgaaatctgtggttggtagccaggcgcctgtaatcccagctacttggaaggctgaggcaggaaggctgaggcatgagcgcaggagttcaaggctgcagtgagctatgattgcaccactgcattctagcctgggtgacagatccagaccctgtctctaaaaaaataaataaagtaaaataaatttaaattaaataaatctgtggttggaactgtggctacccttggaaaagggagtgacaaggaagaggcatgaccggcatctgggctgctggccacgcagcacttcttggtgtggatgctgctttcatgggcagattcactttgtggccatccattggccaggcacaatggctcacgcctgtaatcccagcactttaggaagccgaggcgagcggatcacttgaggccaggagttcaaaagcagcctggccaacgtggtgaaaccccgtctctaccaaaattacaaaaattagccaggcgtggtggtgcacacctgtaatcccagctatgttaggaggctgaggcacaagaattgcctgaactcaggaggcagaggttgcagtgagccaacatcacgtcactgtactccagcctgggtgacagaatgagactctgtctcaaaaaaaagaaaaaaagattcactttgtggtcattcatgagctcaccgtttgagctcctgtctctgcgtagactgtgcttccatagagagaaaccctgtaggtgacctgcagcctgccctttcctgggtcctccaggaacgaggtgcctttggggcaggggtctctggccagcctcatccccaggctaggctctcagggtccctgcggaggagcccacagcctttctcccccaagccctgggagtgagcccctccagcccagggattccacacccagagacaggacatcagcaccctcagctcagggcgccccccacaactcacacactgtcgtggccccctccttccttggcttctgccttccctccttcctcatctttccttcagccggtgctgtgaccggaagagctgtggcaaccggaatgagacgccctcagaccccgtcatcattgacaggtacaggctcagggagggggcctggaagctcagaggagagtgggggaggggcagctgttttcaaccacagagcaccaaggctcaagggaggagcggagcagcccccccggggcaccaggttgggtggctctgagcagagagggaaactgccaggcaccagggagcctccagccgtggcccctgagtgaggccccaggtggccaactttctggagctgctttccccgactccctgagagaaggagccagggagggcagggaggttgagaggggggtgggaagggaggggaggaaccagcactcaggaaccgtccaggtggagtggccagcgtggtcatgtcagcaaaaaccaggctcaggttcccagttcacccctgtgctgtctgacctgacttctctgaacattcgtttctttcactggaaaagtggggaaagagctggcaggtttcagtcatagaattgtcgaggtgatgcatgtaaaagtgcatttgcacaccatgatttctatttctttattttgtgtgtgtgtgtttgttttgttttgtcgcccaggctaaagtgcagtggtgtggtcatggctcactgcagcctcaatctccgaggttccggtgatcctcccacctcagcctcccaggtaattgggactacaaggacacgcctccacacctggctaattttttgtattttttgtagagaccgggttttgccatattgctcaggctggtcttgaactcctgggctcaagcaatccacccacctcgaccttccaaagtgctgggattacaaacatgagccactgtgcctggcctacttctttttgaagaggaaatgcataaataaggtgtaaaattcaaatggtacaaaacagtaaataatgaaaaggaagtctccctccacccctatgtagagcatactgtacatgttttttttttttggtaacaatatattttagatattccacacaggaacataaaccatatcttattctccttttaatagaaaaagcattcataggtgcaaaaattcaagaagcttaaaagggtttacagcaaactgtctcccacctctgtctcccacccatccattccccaccaaataagctaccactattagcagtttctgttgtatccttcctgagatagtctgtgcatatacaacaaaatagttatatgttctttttgtaccctttccttttgtttttataaaaatggtgacagtggctgagtgcagtggctcatgcctgtaatcccaacactttgggaggctgaggcagggggattgcttgagcccatgagtttgagaccagcctggccaacagggtaaaatcccatctcaacaaaaaatacacacacaaaaattagctgggcatggtggtgtacatctgtggtcccagctactcaggaggccgaggtgggaggatcacctgagcccaggaggtctagactgcagcgagctgtgattgtgccactgcactccagtctgggcaacagagtgagaccctgtctaaaataataataataataataataataataataaaattaaattaaaattaaaatggtggcaggaagcagaactttcagcacctttctttttccttgaaaaatttagatctgggagtttacatcaggacacaagaagtctccttattcttttttgccactgcaaaatatttcattgtatgggtatgccataatttatttaaatagtcagatattgctggacattttggttgttttcatcccttttcagggatttaaaaatgctgcagtgaattactttgtccatgtgccatttcacacgtgtaaatttatatgaaggctattactaagtagaattgctgggacaaagaatatgtgcatttgtagttttgatagctactgccaattcgatctctgtaggggttataccaacagcattgaaaccagcaattttgagaatgcctattccttacactctggccaattaagtatttttgtttatttgttcaatcaacaattcttgagcatctactctgtgctaagaacttttctacatgctgtggattaagcaatgaccaaaatagacaaaaagccttgtgttcacgggcttacaatctggtaggggaaatagacattaacaaactaaatgaaaaaaatacatagcatgttagatggtgataacagctaagaaaaataaagccattgaggaagatctgggagtgcctaggaaggaaggtttgaagctttagggtatttaaggtctcactgaaaagatgacatttgagccaagacctcaaggaagtaagagagtgagcgatgtatttatgtatctgggggaagaatattctcggcaagagtgtgcctgctgtgtttaagggaaaacaaggaggcccaggtggctggagcaaggaaggtagtaggaggaaatgatgtcaggaataatgaatggggcagaggaaggcacgaccatgcagggtcttataggctgcatggaggccacacttgtgggtcattgtaagggctttggcaggacatggaagccattgaggggtgttgagaatgataagacctgccttatattttagcaagatcactctagctgccatattgacaatgacctgtacaaggcagggagatgagttaggaagccagtacaatagcccaggtgaaggatgatggaagctgagactagggatgctataggggaggttgtaagaagcggctgcattctgtgtacatttcatttcataggcaggactgacaggatttgttatggaaggagagagagagagtcaaagactcaaagatgtctccaaggtttctgacctatcaacttagaaggatggagtttcctgagaagggtgtgatttggggaagagcaggttttggaggagaaagatctggagtttggtttgagcatgttatgtttatgatgctcactaaacatccaagtgaggagctgaaaaagccacagaaaacatgaggatgggactcaagagaaaggttcaggctgcagatgtaaatttgaatgaatgaaatcatcgaggggatgagtgttgatagcaaacagaagaggcctaagaactgaatcctgaggtgtctagtatttagaggtcatggagatgtggaaccagcaaaggagaatgagaagaagtgaccagcaaggtaagagggaagtcaggggagtgtcgtgtcctgaagccaagataagaaaatgttccaagaaggaggcatctgtgtccagtgctgctcatgggtatgataacaaagactagggactgaccattagatttagcaatgaggaggatattggtgactgtcacgggagtcatttcagtggagttgaggggcagaagactgatagaattgtgtctaagagagaacaggaggagagagattggagacagtgagtagaggaactcttttgagttttgctctaaagaaatcaaaggaatcagatgatgtctggagcactgtgtagtgccaagaaaaaatacagcttgctcatatgctgacgagaaacagccaggagggaaggggaaaatgaggatgcaagagagaggggagaattgctgaagcaatatccttcaggtggcaaaagggatgtgacctagtgcataggtagagaggctggttttagctgggagcatagacagttcatccatggaaaagcagggaagacagagacatggacacagaagtggataaatgggtatatccaagtgggagcttggatgttgtcttctgattgctttgttttctccatgaactgagaaccaaggtcaacagtggaagataaggatagagagggagacactagagggcgtgatatagttatccaagagagtgagtgaaccagggggatgaatgtcatgtgattgacaagcggcactgagggtacccttgacgtttatgatcataaatttggtgataactttctccagccatgttgagctgcacaggtgcaggtgcagaacaggtgagtggttgcataaaaccagagttagaggtttgtcagttgagtagaaggaaacatgagagggcaagagactgaaatgtatgtgcaagggatatttattttttaaaaatggaaggatttaagctgggtaaagagacgagtatgatgagagtgtggacatcaattctgatggggccaaaggattgttggagttgagatatgagacaggggttgaactggatgttaggtggatggagaatgggttgcctgcagatgggattcagggttgaattggtaatgcgtggccagggaaggtggagacaagatcgttggagaaaagatgctcacggaatggagaagagagtgcattggaataattatctgtctatactgacattgaaataaccaagaattatgacagggacaaatgttcaagggtgtatataatgatccaggagtaaagcttcatggagtgaaggtaagtgatcttggggaagataaatggcagcaacaagcagtggttaccgtaactattttttctcatatttctccatcgtgtaagcgaacagcagtatcccagtgatttccgtttctcttactctgagtgaggttgagcccaccagggctatttaaaggctatttgtgtttcctttactgtgaactgtctgttcatatcctgtgcttatttttcttttctccttccttccttccttccttctttccttccttccttctttccttctctctttctctctctctttctttctttcttttctttctttcttcttttttgacagggtcttgctctgttgcccaggctggagtgcagtggcgcaatcatagctcactgcacctcgacctcctgggctcaagccatccactcaccttagcctctgaagtagctgggaccacaggctcacgccaacaagcccagctaacttgtgtattttttgtagagatggggttttgccatgttgcccaggctggtctcgagctcctgggctccaggaattcttctgccttggcctcccaaagtgctgggattacaggcatgagccacaacaccccaccatgtgcttatttgtatgtaaattattgactttttaaaaaactgatttgtaggagtgtgtattaatgaaattatccctttgtgatgagttgtccatattttttcaagtcatttaactttgcctatggtgaaatttgcccagttcctaaatcttttacatactccgggttttcattatatttagaaaggcctttatcactccaatattattttttaaatgtatcctgtggttgcttccagtatttagatggtttcattgtttacatttaaatgtttgattcatttgaaaaatatcttgttactatatcctatatgatacatgcaaaagaaaagtaaaacaaaataaaaattataaggtataattaaaaattataaggtataataaccaatgtacacctgtgaacctaccaacaaacttaaaattagaacatgagaaataccattgaagccagctccccccagtccccataccactgcctaaccctctcctacaggtaaaccaagttttgtgtttatcatgacctggcttgttaaaaaaaaattcatcacagattgcataatcctaaaaaaagtgtgttggtgtagtttagttgtgcttgtgtttaactttataaaaaaaaatgataccatgttgcagcaaccttctgcaatgctctttttaaattcagcatatttctaagatttatctatcttgttgtatttagctgtagtttgttgtatttagctgtagtttgtcatatttagtttttgctattataagcaaagctgctatgagcattcttgtttgtgtctcttaatttgagtaagtacaagagtttgtttaggatataaactaggtcaggaattgtcaggtcatggatacgcacatgatcatcttaacaagttgatgtcaactgttttccaaggtggtttgactaagtaacactcccacccacaatactgagtttctatcgctccacatcctcaccaacacttaataatgtcacacttcttatcgtttgccaatctggtgggtgtacagggcattttgtgatggccttaatttgcattttccagattactattgaagttgaacatcttttaatttgttggcttatttatttatttatttatttttgagacacagttgcactccgtcgcccaggctggagtgcagtggcgcaatctcggctcactgcaacctctgcctccctggttcaagtgattcctgtgcctcagccttccgagtagctgggattacaggcgcacgccatcacaccctgttaatttttgtatttttagcagagatgggatttcgccatgttggccaggctggtctcgaactcctgacctcaagtggtctgcctgccttggcctcccgaagtgctgggattacaggcatgagccaccgcgcccggccttactctgtattttactttaaaaatcttgccaggcacaatagctcatgcctatagtcccagttactcagaggttgaggtgggaggattgcttgagcctggaaaattgagggtgcagtgagccataatcccatcactgcactccagctggggaacagagtaagaccctgtcttaaaaaaaaaaaaaaaaaaaatccttgccaggcgcagtggctcacgcctgtaatcccagcactttgggaggccgaggcgggcagatcaccggaggtcgggagttcgagactaggctgaccaacacggagaaaccctgtctctactaaaaatacaaaaaaatcagccgggtgtggtggtgcatgcctgtaatcacagctactcgggaggctgaggcaggagaatcgcttgaactcaggaggcggaggttgtggtgagccgagatcgtgccactgcactccagcctgggcgacaagagtgaaactccgtctcaaaaaaaaaaaaaaaaattctttttctctgctgaggtcatgaagatattcttctatattttcttccaaaggtttcacagttttccctttcacatttgtcatccctatggaactaattaggggtatggtgtgaattaaggaatcaatgtaattattttttacttaggaactaccaattattccaataccatttattaaatagctcatcctttcccactgagttgtagtaccagctatgtcctatatcaagttttctgctatttgtgggtctgttcctagactctctattttattcctttgatctatttgataactcctatgtaatcatcactttttaaaatcactatatctgtataataccaatgcaaggacaagtgtatagggcaagtcttccaccttccctgaacattcttcagttgaatattggatattttggccttttgtgtttccatgtaaacaccacactcctcttagagttttaagcaatattacaatgaacctatacgtcaatttgaagaagaatttgtctttatgctactgagtcttctgatccatgaatatggtttatctcaccatttttgtagatcttctttaatgcttttcaatatagttttataattttttcaataacggccacaaatactcattactttcactaattcatttattcaataaatatttattgagcatctactatgtaccaggcactaggtaaacagtacacttaccaggttctaggctttaggaatacaagagtaaacaaagcagacaaaaaaaacctgttctcctggagagagaatatatagggatggggaataaataattattgtaagtctttagaaggtaataaatgaaaaaatagagaaaaataaaacaaattaggattgggggaatgtacaattttaaatgaggtagtcaattaagccaaattgagaaagtggagttacaggaaacactgaagagatgaagaaatgagctatttagttgtatgggtagcttatttccaggtactatttgtattttgttgctattgtaaatggcatcttttgttatgttttctaattctttgtttatattatagagaaatgcaactatttttgcattgatctttgtctttagatttgccttgtttttatttttttatgtagacagccatcttatacaaacaaatactgttttattttatctatccagtccttatatattttatttctttttcttgctttattgcactggctaggacctcagttacagctttgaatatacgcagtggtagtgggcattctttttttttttttttgagacagagtctcgctctgtcgctcaggctggagtgcagtggcatgattgcagcttactgcaacctctgcctcctgggttcaagtgattctcctgcctcagcctcctgagtagctgggattacagatgcatgccaccatgcccggctaatttttgtatttttagtagagacggagtttcaccatgttggtcaggctggtctcgaactcctgacctcgtgatccacccacctcagccttccaaagtgctggaattacaggcgtgagccaccgcacccggctggttaatgttaagccaattctacatttcccagataaaccccacttaataaggatgtattatctttttaaatatactgtttgattctactttacattttgttaagaatttttgcatgtatgttcataatggatatttttctgtagttttcttgtaatttctttggttttgggattggggtaatgctggcctcatttgaattgattgggaagcatttccttctcttcaaatttttttgaagagcttgtgtggaaccagtataatttcttctttaagtgtttggtggaattcaccataaagccatctggggctggagttttctttgttggaaggattttaactgtaatctcaatttctctaatagatatagaaggttattcatttctttctgagtgagctttggtaatttatgtgtttcaaagaatttgtcaatttcttatgagctgttgaatctgttggcataaaatgtttataatattcccttatcatccatttagtatttctagaacctatagtgatgtcacctctctcattcctgatactggcaaattgtgtcttctctttttcctcatcaatctggctacaggtttatccattttattgagcttctaaacaaaccagcttttggtttcattgattttctctatcatttttctgttttttgtttcattgatttccactttggtatttatttcctttcttctgcttacttttggttaattccttctccttctggtgtcttaaggtggaagctaagttattggcttaaaatctttcatttttgtcttaaaatagacttttagagacatacacttctcctcaagtactgctttcggagcatacccaaaattctgatatgttttcatttttattcagtttagaatgctttcaaatttcccttttgaggtcttttttgacccacatgttacttaatttccaaaaacttggggggattctcctagaatctttttattatcaatttgttttatttacttatttattttgagactgagtctcactctgtcacccaggctggagtgcagtggcattatgatggctcactgcagcctcaacctcctgggctcaagcactccctctgtctcagcctcctaaatagctgtgactacaggtgtgtgccaccatacccagctaatttttgtattttttgtatttgtttgtttgttttgagacggagtcttgctctattgcccaagctggagtgcagtggcgcaatctcggctcactgcaacctccacctcccaggctcaagcgattctcctgcctccgcctcctgagtagctgggactaaaggtgcccaccaccacgcccagctaatttttgtatttttgttagagacggggtttcaccatattggccaggctggtctcaaactcctgacctcaagtaatccaggccctggcctcccaaagtgctgggattacaggcatgaaccaccgtgcctggccttttgtattttttgtagagacgaggtctcaccatgttttccatgctggtctcgaactacagggctcaagcaatctgcccacctcagcctcccaaagtactgggattaaaggcgtgagtcaccatgcccagcccttcattattaatttctaatttaattgcattgtttgtcagacaacatgtactttgtgtgacttgaatccttttgaatttattgaaacttgctttatggcatagaatatggcccacgttggtaaatattttgcctgcgcttgtgaagaatgtttattctgttgttattgcgtgaaatgttctataaatatcaaacaggtcaagttaattgatagtgttgttcaagtgttgttttagctgattttcttcctatttattctactattgaaagaagggtattaaaatcactgaccattattgtacatttgtctatttctccttgaggttctatcaattttccttcatataatttgaaaattcattgttaggtacatggatgtctagaattattatgtcttcttgtttaattgacttctttatcataaaattcacaaaatctactttgataatatatagtcacactagctccctgcaacctccgcctcccaggttcaagcaattttcctgcctcagcctcccaagtagctgggattgcaggcacccactaccacgcccagctgaatttttgtatttttggtaaagacagggtttcactatgttggccaggctggtctcgaactcctgatctcatgatccccctgcctcggcctcccaaagtgctgggattacaggtgtgagccaccgcccccggcccattcttcttttctttatctttttcttcattttttttccccctttctttagatgacttgggtttttcagattatcttatttttgtctcctgtgttggcttcttagcaaaactctatattttgttatttcagttgtttatttagaacttattgtatatatcctaaacttactgcaatctaccttcaattataccccttcttgtattgtatgctattactgtcgcagactttatttttacgtgttataaaatccaaaatacattgttattattttgctttgtcaattgcttttaatgagatttaaataatatttaaaatattttatctatttatccatgtagttaccatttcctttctgttgatccaaatttccatccagtatcaattttcttaggcctgaagggcatccttaaatatttcttgtattgtttgtgaaagctattttgctgggtatagaattataggtgatagttgggtttcttttttattggtttgtaagatgtcgctccactgtcttctctcctgtgtttctgataagaaatctgatgtttatccttatctttgttcctctgcacataacatgtctttcatttctagctgcttttaagatattcttataattcattttgagcaacttgattatgatgtacattgatggagttttcttcatgtttcttgtgcttagggtacattgatctttttgtttctgggagtttacagttttcattcaatttggaaagtttttgaccatgatttattcagttatttttttctacccctcttctttggggactccaattactcacatattggaacttcttgaagtttttctgcagctcactgattctcttctttttttttttttttttttggatttttttccctctgtgttcgttctgaatagttttaactgttatgccttcaagttcactaatctttttttctgccagttttcatctgccattaatcccattccatgcaattttaaaaatctcagacattgtagtttttatctctacaagtttgatttgatttgtatcttttttatatcttccttgtctctaagtttctttttttttagatggagtctcgctctgtcacccaggctggagtgcagtggcacgatctcggctcactgcaacttccacctcctgggttcaagtgattcttctgcctcagcctcccgagtaactgggtttacaggcaagtgccaccatgcccagctaatttttgtatttttagtagagacagggtttcaccatgttggccaggctggtctcgaaatcctgacctcaggtgacccgcctgcctcagcctgccaaagtgctggaattacaggtgtgagccactgcacctggccccatgtctctaactttctgaacatataaaacacagttataataactcttctattatatttttctgctgattctaacatctgtgtctgttctgagtcagtttcaattgactgattattctcttccttacagatctttttttaagcatcttggcatgcctggtaatgtgtaattggatgtcagatattgtgaactttttcttgttgggtagtagatatttttgtatttctgtaaatcttgagctttgttctgggatgtagttaaattacttggaaccagttttgtctttttgagccttggtcttgtttttgtttttgttttttcttttttgagatgggagtctcactatgttgtccaggttggacttgaaatcctgggctcgagcagtcctcccacctcagcctcctgaagtaaccaggactacaggtatgtgccactgccctcattgagccttgcttttatgatttcttagatggtccacagagtactcagtctggggctaattattcctcactactaaagtaagactttcctgagtactctacccaatgccctatgaattacgaggtgtttttttttttcagtctagttggtagaaacaagcactattttcatccttatgtgagcaccaagtcatgcttcctttattcgttttgagtaattctttacttggcttcagatagttttctcacatgcatgcctttatcagtactctactaaatgttcaaggaggttcctccgcaaatctctaggatactctttgtatgcagctgtctcctctccaagaaatctagctaccttggtctccctggaccctgagctctatctcctcaactctgggagtctgctgggaagtgcctcagttccttctccctatgccacagcctgaaaacactcagagcattatgctgggatatttgtaaggtttagcctgtttatttctcatctcttggggatcactgcccttcattgtgtaatatctattgtcttgaaaaatgttttatttatttcatctggtatgttttgttttgttttgttttcaggatacaggtaaatgtggtctccgttactccatcttggctagagcagaagtgtgtttcttaatttccaaatatgtggtatttttctagttatctcttgtcactaatttctaacctaatcgtgtgtcttattggatctactatattacacatgtccattaaatcaagattgtgttgttcaagtctatctttacttataattgtctgcttgatctattggaaactgatagatgaggttataatctcccgcatgagttttcagcttttccctgttgttccatcaatttttgacacatatatattattactattcgataaattgtggacaggcttttaaaaactttataacttccttctgaattgaaccttttatcagtattcattgatactttatttctaataatacttttgcttcaaagtctgttttatctgatattatttacaggctccctcaaaacacttttggtgatatttgcctcagatactttttactctgcatttattttcaaccattatgtgtccttatgtttagatgtttgtcttttatttatttttatttttttttattttttctttgagacggagtctcgctctgtcgcccaggctggagtgcagtggcgcaatctcggctcactgcaagctcagcctcccgggttcacgccattctcccgcctcagcctcccgagtagctgggactacaggcgccgccaccacgcccggctaattttttgtatttttaatagagacggggtttcaccgtgttagccaggatggtctccatctcctgacctcgtgatccacccgcctcggcctcccaaagtgctgggattacaggcttgagccaccgcgcccggccagatgtttctcttttaatagcacgttgctggattttttaaatctagtctattttttaactggcaagtttagttcatttactttattgagattatatttttttcaattttattggtgtataggtgacaaataaaaattttatatctttaatatgtacaatatattttaaccattttctaccatattgctttgtgctttctatttgttccacttctatgtttctttgttttcatttcctgtcatttaaaaaattaagtatttcatttgatgtgtgtgtgtttcttatctcattttctcttctttaatggtttggaactgtattcacttcaattctatcctttgagttattgcccttgaaatttactacatattcttaagaaagtcataattcctttcctgactaatattacagtttttagcaatgatgtgttggagctggtttatactggctcacaagagctgattgttagcatctcttctcagttttatattcagtgacacccattggcagtttgaaatcaaccatgctgggaacatataaccatggaaatcaacaacactataaatcagagttttgcaccctgaaaatttggaaatggttgttaaacattaaccagtacactactgatcttaggccattctatcacacctgccctattttttaaagctgcatatcattgttatgcttttttattatatatgaataattttttttaactctgctaaattttctgctcaccttttccttcttgcattttgcagctttttggagggccattttctttctttctaaagtacatcttttagaagttccttgaaaagattggctggtaataaattgtgttctcacttttgtctttgtatgactccgtttcttgaaagatggttgttctgggaacacaattccacattgacagttattttttacttagtactttgaatatatttccatttttgttgttgaaaagtccagcatgccaggcatgatggctcatgcctttaatcccaacactttgggatgacgaggtacaagaatcacctgagcccaggagtttgagaccagcctgtgcaacatagtgagaccccatctctacaaaaattaaaaaattagccatgtgttgtggtgcatgcctgtagtaccagctacttgggtggctgaggcaggagaatcatctgagcccaggagctggggattacagtgagctatgatggcaccattgcattccagcctgggcaacagagtgagatcctttctcaaaaaagaaaaagaaaagttcagcataattgtcattcttttgtagataaactcactcttctctctggcagtatatgagagcttctttttgtctttaaagttcttcagtttcactctggtatgtctaggtgtggatttttaaaaattctgcttagaatgtgttggcttatttatatctatggatatacatcttttaccacgtctgcaaatttcttagcctttgtctctcctaatgttacatctcatttgctttctctcttttctcttctggcactccaaagaacactccaatttagatctttttatttcatcctccatgtatcctaaacaattttatatttcccacctatttttctcttcatattgcattctgggtaattgtttttcattcatctttcaagtcattaattatttctttagctgtatctaatttttaatttatcccatgagttttttatttcaatgattctattttttatttctgaaagttttatttagatcttttgcaatatgtctagttattttgcatggtctcttcttgcttgctcatatttctaagttgatttttatttctttaaatgttttgtagttattttacattctgtatttggtaatttcaatatctgaagtccttggggctttaaatctgttgtccattatttctgctattactcatggtggcttgtttctgtgtttggtctttttgttattgatgtggtggtggttattttagtttatatttggttgaaccaaatctggccccaaaccgggtatgttttcccccagaagaattttgtctgattctgcctggaacaaggggtgctaccaacctcagacttttctaggttcctcagaggatccagggccctcctctcaggtggttcctattctccatcccggtgtttatattggcatttgccacaagtacagttctgatatttgtgtatttgtgttagctcatagcttatggctcccaattagatttcaactcacttatttttgttttttagtatctttggcaatttcccttaccgtttttatgaaagcctggtatctagttctattgccggggggacctcaagatatgtagtctgctattatcctagaagaggaactcattcattcagaatttacactggtgaaaggtagaaaataaggctctacatgtatttttttttcttatggcttccagttgccccaagagcatttatttaataatccatctttcttccatcaattggaaatatcaatcacatcatattccaagttcccaaatgtaattgtatgtttttctggacttttcattcaattttattattccatctgtttttcatggggaaatatgatgctgtggccaggcaaagtggctcatgcctgtaatcccagcactttgggagggcaaggcaggaggtgaggtgtagtaccagctacctgagaggctgaggcaggagaatcctgacttgaagtcaggagtttgagaacagccagggcaacatggtgagaccatgtctctacaaaaatgttttttaattagccaggggtgatggtgtactcctgtagcctcagcttctcaagaggctgagttggaggatcactcgaacccaggagttcaaggttaccgtgagctatgattgtaccactacactctagcctaggtgagaaagaaagaccctgtctcaaaaaaaaaaagaaatatgatgctgtttcaatttttgaagatttaaacgtgttttaataactggtagatctagtccttttcccccattactcttatattttagaattttcccaaatattcttgattatttgttacacaaactttacaattagattatctagatcaccaaaacataacttcttggtgtcatttttttaggttgtggtaaaaaacacataacgtaaaattttccatcttcacattcatgagagtatggttcggtagtgttatattcaaattgttgtgcaacagatctccagaactttttcatcttgcaaacccgaaactctatatttattaagcagctccccatctccctctccccccagcccgtagtagctgccatcctaccctctgtttctatgaatttgactactttagactcctcacataagtggactcacatagcatttatctttttgcgactggcttattttacttggcatactgtcctcaaggttcattcatgtaacatgtgacaggattgccttcctttttaaggcttaataatattccattatatgtatataccaccttttattatatattatatgtttataacatgtatatatattttattatatacatacatcgcattgtatgtatatactacatttatccatcaatgaacccttcagttgcttctatctcttggctatgaacatgggtgtgcagatatctctctgagatcttactcctttccatttttttggatatacagtcatccctcagtatatgcagggattggccaggttccccatcctgcccacacatgtaccaaaagctgtgaatactcaagtgccacagttgtccctgcagaaatgcatatatgaaaagtcatccctctgataagcaggttttgcatcctttgaatactgtattttttaatctgcatttggttaaaataaatccacatataagtgtacccagacagttcaaacctgtgtttttcaagggtcagctgtatacctagaagtggaattgctgaatcaatggtagttctatttctaattttttgaagaaccaccatactgttttctatttaaaaggtcgcaccatttaaaaatcccaccaacaaagtttccagtttccccacatccttgccaacacttatcatcttttttatagtagtcatcctaatgggtgtgaggtaatatttgattataattttgatttgcatttctctaatgatgttgaacatcttttcatatgcttcttgaccatttgtacatgctctttggagaaatgttcattgagatccgttgcctatttttaaattggattatttgggggttttctgagtgttgagtgttaggagttccttctatattctagatagtaacccctcctcagatatatgacttgcaaatattttatcccattctacaggttgccttttcaccctattaattgtgtcacttttattgaaatcatgtttaactcagattaacctggaggaaatggaatatttatgataccaagtctttaaagtgctttgaaaatgtaattcatttattgtataagttgcactaagaagggtgcaaacaaaagcagctttaccatttctaacaactgccctataaacctgctcggtgagatcatttctctccatccctggatgaaataatggactattccttcatcttttttccaccactctcatgaaataaaaatcctctgatcacttaggtaagaaaatgtccagaggagtgtaacaaactccagagattgtctgattctaaagcatctcgtcatcctggcttggtcctgccttgggtttagtggtgaggatgggtttggtaaaagggtcttctccctttcttcattcaccttcacccctacttattacctgtagtctagagtcacctccatggttgaggtggctgaagggaaaagaggttcgggggcggggggttgaagggacaaggtgttcctaggtgacacagtggcaatctgtcatttgtgcctctggaaatggtgaataaccctggctttctttctgagcttttgtagatctctcaaatcccccatccaggaccctctgatggccttttgtgatcccctcagcttctagacctgattctttatccacagcaggattcctaacctgaggtctacaagaatacctgtgggtccataggtagagttctgggaacttagatgggaaaattccattttttttttacacagtttccagtcctggaaacctttagctaatctttagcattccttcaatggtgggaatgggcaacagatcaccatagtattaatactctgtgtaattttatcactagaatggttaatttccatatcatagtagagctgttgcagatattttgaaatcccattatactcactgccacttcaagattactgtagttgttagaacagctactagatcttattacttaataaattaataaagtgtgaatataactatataaccattttaaaatgttttttgataactttcaatataattggtttattttataattctatgaatttattttgtacatatgaaaacaatatgctgagaatgggttcaatgggtccatggcaccaaaaaaaaaaggttaagaactcctgactgaaagccttcgccgactcctattgagcgcattttcgcaacagttcacagccagccacgctcaaagaacccaaatctggctgatgaaaaacaggcatggtccttgccctaatcagctctgaaacagcatccggttcttaaagccacccccaccaatgtctggccccgcttagctactcaggatgagcttgcctttccccagcctcttgctgataaacttcacaagtatgaatttagtatggatctctctgctctttgaattctagtggatgcttgtcaacttctgcaagcagtccttttgaagctcccctactaggccgaagtgagacagacacaccccacacttcctccccattgagatggggggagctacagcatcttgagagctccacctaccacagttcctatttttcaccctagagagagatgatgagctcaaggacagtctatgaccgggtagcataggtggtccagcagctacattgtcgttcttaactttgagacctcagctgaaaccaagacaaaaagagtccgttttcacatcctattacacaaagagtagtaagtagaggttgttactatctatagagattgttaccctctagaagcagaacctgaggtggggattcaatttcctccctcacagggagtgaaggaagcaggaggaggcaggcagcagagctgagtaaggatgtgcattgaactggagtccaacctccagcctcagagccactggaagctctggaatgtggatcccactctgtggcaaggacacagtctttggcagctctttgagagcaagtcagtcagaggctgccggccagccctatggtgagggaataaccacccctggcatttccaggtgccctgtggctgagggcactttgcagctgggggatgaatgcacttgcttagtgtattagtttcctaaggctgtcctaacaaattactgcaagcttggtggtttaaaacagatgttaattatctccccattctggaggccaagtctaaaagcaaggtgttggcaggtccgtgctccctccaaaggccctaggggtgaatcttcccttgcctctcttagcttctggattctgttggcagtccctgtggcggcatcactccaatccctgccttcatcttcacagtgcctcttcctcttctgtctaatctccctctatcctattgttataaggacttcatcactaaatttagggcccactcagataatccaaattgatttcatctccagatcctgcaaagaccctttttccaaataaagtcagtttcacaggttctgggatgtagacataacttttgggggggccaccattcaactcactacccccagtaaagggggttggggtgaggcaacaatgacgtcccctatacaagtaatccttaagccaccatatcactcaaaacaagctctgtggactctgctgtccccttaactgctggagagactcatgagcacacatacatgaagcactgttccctttaggcatgcgaagctggcctgtccaccctctgcaaaaacaggacgcgcagggccctgtcggctgtgcagcagctctgctggtagaaagcattcgctttcttctccaccagacttcttatataccatcctatcagtcagtgctccaatcataaagcccatctcatttccctcctaccagccttgctgggttttttgtttgtttgtttgttttagatggagtctcgctccatcaccaggctggagtgcagtggcgcaatctcggctcactgcaacctccacctccagggttcaagcaattctcctgcctcagcctcccgagtagctgggattacaggtatgtgccaccatgcttagctaatttgtgtatttttagtagagacggggtttcaccatgttggtcaggctggtctcaatctcgtgacctcgtgatccgcccgcctcagcctcccaaagcgctgggattacaggcatgagccactgtgcccagcccagctttgctgtttgatgacactgtaagttagcataatgtgctgtgacaaagaatccccaaatgtggtggcttaaatatttgtttagttctctcaaaacagtccagggcatcagtccagggtggctcttctccataaagtcatccaggaccaagcagtcttttcctcagctctcccctaaggtgacaccctcatctgtatagcccaaacaggctcagagataccaaaaggggatagaagaaatagggcatgcagcttacttataaagacataacctaaaggtcccaccttacctctgctcatgccattagccacaccctgctgcaagggaggctgggaaagatagcgtctaaatgggcatccctcaacctaggtaagactcagagggttctatcatgaaaagaaaggaaggaagctagataacggggacagccagcattctctgctgcggacatctgtctggccacttctactgtccttcttcctacgaacaaaccaagtttttctctgtccgtgggtaccagatgcctctctctcttaagcaaacccctgtaatctatggtattccttttagaacagggaactggcacagaatccaggcctccatctgcctgtgacttgatgggccttgtgcttctgggatgtgaacgtgaattcttaggaatagagctaaagccaggagtacctcacctttcacttgccacttcacattgtgtgtgcagagcttcaacacacagaatgtgagtttctttatcagttgcatgctaggttgggccccagtcaaacttaatagttctatgcattcttgctagtagggtattgaagttgccagttattattgtttgttccttcaattctgttagtttttgcttcatgcattttggagctgttattagatacatgtgctttttttttttttcttttgagacagggtctcactccagttgaccaggctagagtgcagtgatgcagtctcaactcactacagccttagggctcactacagcctcaacctcccaagctcagctgattctgccacctcagccccctgagtagctgggactacaggtgcatgccaccacacccagttaattttttgtatttttagttgagacggggtttcaccatgttgcctgggctggtcttgagctcctggattcaagcaatctgcctgcctcagcctcccaacatgcgggggttatgggcatgagccaccacacccggactgttattagatacacatgcttataattgttatttctttctgatgatagacacttttatcattataacatgtccttctttgtctctcataatttttatcttagtgtctattcataaattagtatagccactccagctatctttcagttagggttcacatgttatctctttttccatccctttattttcaaagccttttgtacatttgaatttaaagtatgtctcacatagacagcatatagttggattgtgttgtagttttcttttttaatccattctgccaatctcttccttttaatgaagcatttcatccatttatatttaatgtaattgctgatagaacaggatttatgtctgccattgtgctttgtgttttctttttcttttattttttctttttcttatttttttttgagacggaattataaagagttcccatatatcccctatccccacaaatgtgcagttgtcttttaaattagataggaaaacaaaatcattacaaacaaaaatacatttatgctgtcttttatgtttacctatgtagtgacttttaccagtgctctttatctgttcatgttaattcatattactgtcttgtcttgtttcatttcagactgaaggactccctttagtatttcttgtaggacaaacctgttagtgatgaatcctctcagtttttgtttatctgaaaatgtctcaatttctccttcatttttgaagttgatcattttagaagttgatagttttgctggacatgcaattttttggtcgatagttgttttcttttaacacaatatatcatctcactgccttctgtccttcatggtttcagaagttatgtggtgatcttattaaggattccttatatatgacgagttacttctctctctctctcattgcttctcagatcctttctttttctttggctttcaaaagtttgagtatgatgtgtctttgtatagatcatacactttgtgttcatactacttggagtttactgagcttcttaagatgtgctcaataatgtttttcattactgagcacatttaggaaatttaggggcattttcttgaatatttttctgtcctgttccatctctactctccttctcagattcccattatacatatactggtatgcttgatggctcccacaggtctcttaagctctgttcatttttcttcattcttttttctttctgcttctgagctagataatctcaattggcctatattcaagtatactgattttttttcgtcccaccaaatgagatatgttgttgagttcctctaggtcaggggtgtccaatcttttggcttccgtgggccatattggaagaagacttgtcttgagccacacataaaatacattaatactagcgatagctgatgagaaaaaaaaaaaaaaagcaaaaacatctcataataagaaagtttacaaatttgcaggctaattcaaagccaacctgggctgcatgtgccccgtgggtcgcaggttagagaagcttgttccaggtatttttaaattttacttattgttcttttctacttcagaatttcatgggtttttaaaaatataatttgaaatcctttattgatttttttggtgtgacttcattctcatacttttcttgaattttttagacatagtttcctttagttctatgaacatatttataattgctcatttaaagtctttatctatgccagctgcagtggctcactcctataatcccagcattttggtaggcagagaagggcagattgcttgagcctaggagtttgagaccagcctgggcaacatggtgaaaccctgtctctacaaaaacctacaaaaattagctgggcatggtggctcatacctgtagtcccagctacttgggaactaaggtgggaggatcacttgaacctgggaggtcaaggcttcagtgagccatgatcacaccactgcacttcagcctgggcaacagagcaagaccctgttccaaaaataaattaattaataaagtatttgtctaaaaattctaacctctgggcttcctcagggatagttcctgttggctgctttattacaatgtatgggtcttactttcctgtaccttgcatgtctcataattgtttgttgaaaactggacattttaatcatataatgttgcactctggcaatcagatcctccctcccaattttgttcttattgctattgctgtttgtttgtttagtgattttcttggactaattatataaagtctatatttcctgtcatgtataatcactgaagtttctgctcttggcttagttatcaggccatgattggacaggcatttctttaaatgccttgaatgccaataagtgttcaacccattgccaaaaggttctgtatgtgtgttaagacatgccttcagtgctccagcgatttacaactctgccttgaccttcacttcctgcttgctcagggccttgggataaaccagaggtgagagaccaggggctttccatgccttttttgggcatgtgcctctccctgcacatatgcatagctttctagatctccaggaatatgtcagagcttttcagagcccctgtgaacatcttattccccactttttcctttaaaatattatggccaaacttttatttgcccccaacttgtattgctgcctcatgtagctgcaatgttaagcaattgccgctggctgttttcaacaaacaccctgaagatagggtctttcccactaagtaagttctgaatcgggtcaaataacaagttctgcaaataaagctgtcagggagttgctagaaaggttaaagagtgaaaactgactgggaatacagcttgttgagaggctccaaacccactctaccccttcctatggttgctagcttgctagttttcacaactacaatagtggttgcaaggtagctggtcttcaacagggctggggagtaggggatgggaatagggcaaattaaaacaccacaaagctttctgttcttattacaactcagccatttttcttgcctcaatgttccttgagttgttgcacacatgttgttaatttttagagttctgagaaagttgattttgaccatgtttgccagtgttcttgtttctttatggaagaatggattttcagaggtctttacttagcaattcccaaagtcctgtccctgtaattgttatttcttacctgggcacaagttaaaagtgccttgggggctttagtccagcattcatccagtcacagtaatttttgactcttgaattctatcatgaatcaatcagcacctgttgtggggctgggactatgatggatgcttgggagaagagaggcttaaacaatgatccctgccctctgagagcttacagagcagttgaggagacaaatataattatgtaaacaacaatttataattttgaaaaaaattcgtgtacttgaagaaaggtcagtagagattatctataattacataataataagaagaaatagaaaacaatgtaaggcttgaagaccacactatccaatagtactttctgcaatgatgaaaatattctgtaccaaccaatatggtagccaatagccacacatatttattgggcacttgaactgtagctaccgtgactgaggaattgaatatttaattgtgtttaatttaaatcaaatttaagaaataacacatggttactgtatctgacatcacagctctaagactttaaatatttgcttgattggccaggatgaccctgtggcaggggtagggaaacataccctcccatgggaggctcatagctcttctctggctcctagggatagatagaagctgggggctatggatactccctggcatttaattgtgcctgctgcctggtgggtgttgttcagtgacactattggaatagtttaggtccgagccacctggcaaaggtaagctctggtctactctattgggggcaaatttagaccctagatcaggcacattataagtgcaattagatgaaaggggctgtgggaactgcaaaagaatcagcccccttcctaatccactggtcaatgcaacattccctgttttcctctacagccacaaaactagcccaatgtcatccatctccttccacgctttccagcaggatctcccacactcatgctgcaagcacagacttctgtccagatccattctggcaatcccccttgaggttccagaacctccctgctgggtcagtgctgaggtgagactaaggtttccctcttgccacctgaatgcactgcacttccttccccattccccccaacccccaccactcttttcagagctgagagcatttgagagagggagaagcagagggggttcaagagagattcgctcatgtgctccgaaggtcatataggctgagatgccagtcataaggacaaaggacccctaatgaagaggaaggacttatgaggagacctctgggcagccgaagccaagcttagggccagactggcctccatgctgagacaggagcagagatttggacagtgcctccatagaaaattgggggaagaggaccgggcgcggtggctcacgcttgtaatcccagcactttgggaggccaaggtgggcagatcacaaggtcaggagatggagaccatcctggctaacacggtgaaaccccgtctctactaaaaataccaaaaaattagccgggcgtggtggcgggcgcctgtagtcccagctactcgggaggctgaggcaggagaatggcgtgaacccgggaggcggagcttgcagtgagccgagatcgcgccactgcactccagcttgggtaacaggagcgaaactccgtctcaaaaaaaaaaaaaaagaaaagaaaagaagattgggggaagagggggaccgcaggcatgaggcagcctgggaaccataataggtggagtggaggcggctagtgagtgaaccgcctgcaacttgaataataagctttctccacaaagtggagagttattgagggctggggactcaagccaacctgggatgtctggctatgtaactgggagcaagttctcacctcccagagcttcagttccctaatgtgtaaaatagagctgaccaatgagcctcctgtgattctgggaaggagaggatgctgtggagttagtaggatgtattcatgcagtgcccagcacagtgactgcctcagagtcatttcttaccctcctgccaccccacccttaccgatcatcttagagtaagtgcagctgagcctggacggcagcaagaaagttcaggccgggcgcagtggctcacacctgtaatcccagcactttgggaggccgaggtgggcggatcacttaaggtcgggactttgagaccagcctggccaacatggtgaaaccccgtctctactaaaaatgtgaaaaaaaaaaaaaaaatggcacctgtagtcccagctactcaggaggctgaggcaggagaatcacttgaacccaggaggcagaggttgcagtgagccgagatcgcgccattgcactccagcctgggcaacagagcgagactccatttcaaaaaaaaaaaaaaaagttcagtgggaaccaaggaggaacgtcctgcctccagaaccagagcccacagtcaggggtagacatcccaggctggggatgggtctttctctgaataggaagggggacattctcacttaatcttctgtctgttctctctgccctgggtgcttggtgaattgtagaagatgccaggccttgctaatacccgctacccacctctcacctgattcatagataagaggtgccaaggtctctggtcttagagcctgggtctcatctacaccaccacctctgcccaaggccagaggaacccacaacttctttccttcagactcccaccttctcctttaaatctctttctgacttgcaagcaccccttccagctctgtggcttctgctgccgtccatgccccatcccccctcctccctcctttttctctatctctccttctcttctgttcgtggactctgatagcctgcattgacagaagactccccaggcttgagaggacttgtgtgggtgcatgtgtacatctgtgtccacacaggcacaccatggtgaccatgcaccagccccttcctgccgctgcatgtggcatgcccagaggcctcccattagtggccactccacccttcctcctctcccctcaggcctggtttggggaaagtggagccactgccactcttggtgggcagctgggggccccttagcagtctctccacaccccctccccttctcctcaggccccatgcccagccctgaggtttggagagcctagtaagtgccctatcaacatgttaatcaaattacttaggagctaaaattgacgctgttcattaattatacaagattatgctaattgtgcatgcaaatgcatgcaggggaacagaaggtgttcaggcgcatggtgggccattagcatagaggatggggtgcgggtgcattggcatgctaatgtatgcgccctggctatttatagtcctccagcccatctgcactgcagccacctctacccgggtggggatcatggtggggaggccaggtccaggcctggcaggtggctgtggccctggggacagtctatcttggcttctaccgcaggctaagaccaggaagcagcctgggccaaccccacatgggcctgaactattacagtaagctcctcatttcccttcccttctctagcgtaggccctttggtgcctgtttctgcctgaagggagacatcccctgtagccttcccatcacccagaggatccaagtcccgcatgatttggtcccaaccccaggccccaagccacgctgccctcctcagtcttgtcaggcaccactgatcgagtgagccgtctgccccgtggtggagctgttagtccctttgcatggagggccctgcctcctacttctcggtgagatcctccaagacccatcacccaagaccaaattggagctctaggaagcattccgcctcccctaggcaaaataagtggccactgcagattacacttggcacatcctcctgccgtgcccaccactctgtcttcctgagtttctctttcctgttgggttgtaatttccttaagattttatacaatgccgcagtgcctaacacatagaaggtatttaataaatctttttaagtgggtgtatggaatgaatgaggggatgaatggcccagccctctgtgtcctcctctgtccctgagctgagggtagagagaagcagacagtgaacacgctggagagccagaaactgcttcagtttcttcggaggctcatgggagcccaagacaaatcttttaggataaaaattagcggagatccctgtccccttatttccccatctcaggctgcagtgccagctttgggcttggaaacacatatccaatttaatctacccttcactcttaacctgctgtctttcccaaggccttcacaggacacactgttgtttggaacatcctgccccagctcgtatatccattcactgcataccttctttctagatctgcactgtccaatatggtagtctcgagccacatgtgactatttagatttatgttcattaaaatggctgggcgcagtggcccacgcctgtaattccagcactttgggaggccaaggcgggtggatcaccagaggtcaggagttcatgaccagcctgaccaatatggtgaaacgctgtctctactaaaaatacaaaaattagctgggcatggtggcagtcgcctttagtcccagctactcaggaggctgaggcgggagaatcgcttgaacccaggaggtggaggttgcagtgagccgagatcacgccactgcactccagcctgggcaacagagcgagactccgtttcaaaaaaaaaatagatttatgttaattaaaatgaaataaaattcagttcctcagttgcactagccacatttccagtgcttagtagccatgcgtggctaatgcatatcattctggaaaaagttcccttagggagcactgtaatctagacacgttcttccttgcccctgacagacctgtagtggaaaatgcactcgggctctccttccagctctttgagttactgacagctttctctttggaagtgagaacataatttcagccctaagtatctcatggggatgcagggaagaaaaagctggtgaaaagccttagctctgtgacctaagttttcttagggtgggattcctggaagcagagcctgagatggggattcttgtgaaagaggtttatcaaaggagagctctcaggagaaaaggaatgagtatagagggagtttaacaaggaggtggtctcggtcggagtctagcgtcagcctatcccatgcagaggtctggagtgtgaatggccagagagttggtcctccttgtaatgtcaatctgtcattggctgtgggctactggtggggagtatatgctcttggctgagggtaattctcagattaccttggggcagctgcgagccatttgacagtctacactgcagctggggcatgagggaatcaggcaggcatcaactcactgtaaagttcctggacgttgtcttccaaaagaagctccaggccaggcatggtggctcatgcctgtaatctcagcattttgggaggctgaatcagaaggatcgcctgagcccaggagtttgagaccagcctgggcaacgtactgagacctccgtctctacaaaaaataaacaaaattagctgagcatggtagtgtgacctgtagtcccacctgctcaggaggctgaggtgagaggatcacttaagcctgggaggtcaaggctgcagtgagccaagatcacaccactgcactccagtctgggtgacagagcgagaccctgactgaaaaaaaaaagcagctccatcccactctgccttctaccccctgaaaacctagaatttaacagtggactcacatcaattgccttcacacttgccttctctactgagtgtctcttttgagtaaagcactgtgcttggggagttaatgcaatggtgtcacccctgagaagtagtgtataagttaaatgtttgcactttagccatactcaacccagagtttgcttctttggtaggaaatactccatggacaagacgtttcttttcatttcatcttgagctgtttttatggggaggaataaaaagcgtttatagacatgattacgaaggctaaaccaagttcaggatgtggtaaggtgggtgtgtgggtgaactactctgagctttcctttaagtcacaggcatcagagtcatgatgcataactaccatcctttagatacttcattagttggatgaccactgttcacagctcttcttctggtctttcattaaagtttttattgagaatgtggaatacaggcagaatggaataatgaagcccatatagccccaatgagctagaacaatttttaactattggttccattgttttttaatactgaagatcttctcgactgatagcagcagtcacaacagccaaaagcccaaaactaggagcaagaggacctgagtttgacctctgcaaccctgttgaatttgtaacctcgaggaaatccccacaacatactatcctggtccccacacagcctgcctctcagagctgcttttgaaggcaggcttgccgctgcagtaccagcctgggtcggactctgagagccccacttagaaggacttctaggactcttgtcggcatcagtggttcataaagacccgttttcatatccttactttagcattgactgtgactttgtcaagtcacagtcaatagcttagccttggttttctcatccgtaaagtgggaatggttgcagaccgacacgacctgggggattgagcaagataatgccaaagtgacaaactcagcagcgttctgggcagttgctaaggtgctgagtgcctgatgggttagacctggttccctgtttttctttttttgttgtttgtttgtttgttttgtttttgcatagttacctccctaatgcatttcatttgtaagtcatgcttgtatttatggtgttttcttccagtaatcctaatggaagcttctgcgacttggcctttcccttactcccttttctgtggggtctggattaggaagccatgccctccaagagcctcatggccacagtgggatggcactgggcactggtcctgcagtggtcaccctccatggggatcctcaggtcagagagggctgtggacttgggctcactttactcctccccactccctgccccctgcccccatcctggtcaggaaaaacgggctttcctagactccttttcagccccatagggccaggagtggggaggggtgctcagagaacacccccaggctcatccaagctttagaggtggggggtggttccatgctgacaagcagggcttcaagcccctcaacaaagtgcacatcccttcctgcctcaagtccctacagggtgtcccaggcccagaaccttgtcctcacttacccagccccttcccaggctctcttctttcaaggggaacacctgcccgcagttcccatgtccacatgtgttccatgtgtgtgtctccctccaactcccctgcccaccaggtctctcactctcccccagtccccagcccccacatctggcctctgtgcagacatggcttggaggacctgctgcccctccttcttcttccctgactccattctcatccttccctgactgctcaggtggaataaagtgtcaccccctgggcgtcagccaagggagaattctcctgggttgttctcacgttcgcccttccagcctctgcggtgtgtctgtctccccctggtgggcaaggagaggaccaggcagcggcacccggagggtcggcagtctctctaggtccaggggagagcccgggcactgctcctggttctagaccccaacggaagtcctctaattccaggtccagccttggaaggcaggagcctttaggggcgggtcacctttgccaaagcacagtcttcaaaatgtcaaaagcgtgattctcatacaaattgctactgagcatgtatcaaagttttctataacttattgatgagggaaccaatgggatgacaaagctgattcaaagaagacgaagagaaagtgatacatgtgcgagtgtgtgagtgcgtgcgtatatggaaaggggttgaggggagggagggagaggcaagggattgtgtggaaaatactggaataagatggccaaattagatataaagctagttaatgtccataggacaattttatcatctttagggctaatttctccaccaaacagaaattatttacttctcctgacaaatatcatttgtttccaagtcatatgaatttgggggcggggagtataaattcacagggtacaagtgaaagtatacaatgtgtggtgatccaatccagatatttagggtgtccatcacacaggtacaatacattttggctaagtatagtcaccccactctgctatcaaacatcaagtttattccttctatcttgctatttgtaccctataacccacttctcttctccctgccccccaactcacccttcccagtctttattatctgtctttccatgctctacctccaggtcatcaaagtttttatttattttttttatttttttttttttgagacgaagtctcactcttgtcccccaggctggagtgcaatggcgtgatctcagctcactgcaacctccgcctcccgggttcaagtgattctcctgcctcagcctcccgagtagctgggattacaggcgcctgccaccacgcccggctaatttttatatcaggtcatcaaaatttttagctcccactgacaaatatcatttgtatcttatcagttttctacaaattagcacttaactttatagtctgtgctccaatcaatcaatagtaaatgcgagtcactttcccctagagacatacactccagtgaagcattgtccgatattaatataatgcaagcaagccacatatgtatgtaaatatgcttttttcttttcttttttctttttttcttttctttttttttttttttttgagacagggtctcactctgtcacccaggctggagtgtagtggctcaaccttggctcactgcaacctccacctcccccgttcaagcaattctcgtgcctcagccacctgagtagctgggactacaggcatgcaccacctcacccagctaatttctatatttttaatagagatggagtttcgcagcattgggcaggctagtctcaaactcctggcctcaagcgatccacccacctcagcctcccaaaatgctgggattacaggcacgagccactgagcaaggcctcaagtcacatatgtaatgttaaattttccagtagccacaagaaactgatacaactaattatcataatgcattttatttaacccaatatatctaaaagatgagcattcccacatgaaatcaacataaaagattactgatgaattattttatattctttttttctaagtcttggaaatctgatgtgtgttttacacttacagcacatctcaagttcggactagccacactgcaagggttcatgccgcgtggggctggtggctatagtaatgggtagcgcagctccagtgcggtagttctcaaacttcagggtgaaccagcatcacctggagggcgtatgaatgcagagatgtgattctgactcagcaggtctgaggggaggcctgagattctacacttgtagcaaggtctcaggtgacgctgacgctgctggtcttagggggtggtgcaggctctctgactgggagaagcctcgtggactaccagctggaagggagtgaggtttcagccacaccatggatggtttcgactatgtgctagctctgaggacaggcccaaagggaagggagaaggggactgaccctcagcccccactgcaggccatggtcttgtgcagctgcttttactcacccacactctgcaggtaatgctagccaggctcaaacactgaggtgtccccatagacagaggtgctggcaggtccctagggctctcagaaaggggtggtccttgaaacctagagtggccagaaaatggtggctgtacagggcgtgagaattggtgtggacccaaaggacaaatgaaacctgtactgtaaagggacagtggcaagacctgctgagcaaaggcttggggaagggccagtgagggagcaggaaaccacagccttggggagggcagaagtaaaggatgtcccagaggcaggactagaaggtgtcacggcagccgtcaatcgctactctcccttcatgggtgtggaaggatttacctaccccgggtcatgcagagagtccaggcctggccagagcccctatcttggccccttcccaaggacccttcctcttgatcctgtaggtttgagtggagtggggtgcagtgggcacatgtgtcatcttttggtgcagtcctatgcttgtcgcatcttcagtggtatccaaaggtgagccttcaatccctttaggacagagaccatgccccatcctggtgtttttccctccatctagcacctgccaaaggaccgagcacacgagtacttaatttaaatgagctggtctgcctgtgtgtgtgagtagggagtctatactctgtcacatgtgaatgtggggcatggatgaggaacatgtcgcacatgtgggtgtagtgtgtttacaccatggggtgtcataaggggtgtagggagtgattagtaactaataagagagaaatggagtgcgcccactgtgcaggtgtacctctcaggagcactgaaggtgtctgcaccttggggtgacccatagggatatatatggcatctacacattggtgactactgtttgggggcataacagctgtctgcactgcagggtatcctgcaggggtaaatggattgtctacactgtaggggtgcaccatttgggaaatatagggggtgcccactgtgggggaacatgacaagtgctgagaatgtagacagaggcaggaccccagggagaggtatctctaggaaggtgactgccaccagctcccaaggaggggctgcctgctggggacacctcagttccagggctggtgcttactcctcccagcacttggtgacctcctttttggggactgggctttcaggacctgtaacaaattttcctctgaacagaaatttaatgtttgcagactttggaggcaactctggtgaattaaatgaacattcaaatttggggtatataagtagtacatgagtaactataccgtggttaaagttccaccccaggtttgggactcttgtatttgctttagtaaatagtatggtaaaaatatctcccaattgggtggaggtaaaatgaggaagctgactgactggagaaactcatacagtggcccaggaggctgttccacatatcaggacctactgcagacgttagccctgcactctacagtttgtaaagggtatcttcccagatgctcacagagtgctataaggcataaggcagacactgatcatattccgagtttaccaagagttaaacagggctgggtgcagtggctcatgcctgtaatcccaacactttgggaggccgaggtgggtgaatcacctgaggtcaggaatcgagaccagcctggccaacatggcaaaacaccgtctctactaaaactacaaaaagtagccaggcgtggtggcaggcccctgtgatccccctgtaatcccctgtaactcgggaagccaagggctgaggcagggacaattgcttgaacccaggaggtggaggttgcagtgagacatggcgagcctgggcaacagagcaagactctgtctcaaaacaaaaaacaaaacaaacaaaaaaaaaaaaacaggaaaaaaaagagtacaacagccagaatgttgtccatggctaccttactggtaggtgacaggaccaaggacccaccctcccagccaactgccaggaaggagaggaggacaaagtgctcatgtgtttgtctaaaaagcaacctcatcagcgcatatgtgtttttttcccaataactctatgtaaaaaagaagacattcacggtgtctctgtaccacatgtctgacagatacaccatgtgtatatggtgggtatgtgctctgtatgattaagcttttcctatgtgtataatggatataaaatgtgtgggaggaggatatgccatgtgggaggtgaatttgctgggggcatctgctatatgggatggctttacagtatttgcaataactatattttgggtaatcatttacaacataaaatgcgtattaatgtatttgttctgtgtatttcctatttctctgtgcatatactgtgtagggtgggcatacaccgtgcatgatgggtacaggctctgtgtctgcttagtatgccatatgtgtgggatgagtgcaggctatatgtggagtacatgttgtttatgcttgtgtgaaggttataccccgagtgtgtgtgatggctgtattttgtgagtaatagtatccaaggcataaacagtgtctacaaagaatgtgctgtgtctgaggagtgtacatggtgtgggtgatgggtatactctggggagggatgtgttgtataacagatgtgctatatgggtgatgagcatatactgtgacgtatacacagtgtgtgataacattacatggggtatgtgtgcgtacacgccacatacggagcatatattgtatgtgtgatgggtatacagtgcgttgggtataatgagtaataagtataggtagtgtatataatggacttactcttcatggtgaatatatactgtgtgggagtgctaagtatacactttgtggcataaataagccctgtgtgatcagcacacggtgtgtatggttgtatagcgaagttgtcattgtgatgggtctgtctggtgtgtatcaggcaccctggtatatggaggccatgatgggaatatgggatgtgtgcctgagtgggagcaggcagaggggactcatcctgtggggagggggcatggcagggagcagttggatcttcatctgtttccagaacccccagacccttgagcccaccgaccacactgtttcaggttcttcctcaagttcttcctcaaatgcaaccagaactgcctgaagaatgcggggaatcccagagacatgcgccgcttccaggtgggtctggagagagggtttccccttgcaaccccaccctttcctgatggaggggaggggagggggaagggaaggctgtgaccctgccaccctgggaaaggcctccaaggcagatctctgcccagccctgtgcctccccagcctggttggtgcctgctgggggtggggcagctccttctcaacttgtgctggctgccaagggaggcttcattagagtcccacttaagaagatgctaattgtgacatttttacatgattaacgacccaggcaatttgcatagcgtgaagcggagagcagctgcccttagcacatccccaagctgcacacccctctcagtgcagggcgggggaagaaggcagccccagttttctccccagaatagggcaggggctcctgctgctgagttctccggctgatgctgcccacctccacttgcctaagaccccattcctggcttggaggtccgtggatacaacccagcattctgtgtatgcaaaaacagtagccattctttgcctaaggagccagttttttcaggggtctttatttttgtagcgcctggggagtcagttcatctgggggtatcacctgatccagctggcccccttccaccagctcagacactgcaggattgaagccctcctcctcccaccagtgaccctaaattccagcatccaaccaccagcctcaaggtgctggttccccaccacattcccctcccgggagcccccgagggccccagccaggctggcctcggctctccccgcaggtggtggtgtccacgacggtgagcgtggacggacacgtgctggccgtgtccgacaacatgtttgtgcacaacaactccaagcatggccgcagggcgcgccgcctggacccctccgaaggtcaggacccccggcccagccccggccgccgcgggcccagccagccccccaggccccacctcagcgcggtcccctgacctgggtcctctcctgcctcccagctgccaccccctgcatcaaggccatcagccccggggagggctggaccacgggcggcgccaccgtcattgtcatcggcgacaacttcttcgacgggttgcaggtcgtgttcggaaacgtgctcgtgtggagcgaggtgggccaaccccgccagtctccctctgggcctaggggctgggccctcccctcgccggtgcgggacctgcaggcctcccctctcccctcgcagctcatcacgccccacgccatccgggtgcagacgcccccgcggcacatccccggggtggtggaggtgaccctctcctacaagtccaagcagttttgcaagggatgccccggccgctttgtctacacaggtaaggagtcgggcgggggagtggaggtctaaggtgcgcggagggagccccaccctgcgcactggtctccgttcttggtgataggagttagccgagctctacgctgtggccacgacccctagacggccccgggcccctttaaccacctatgcctgtgatcgctccgctcgcaggaccgtctttccctggctctgtgtgtttccctccctggcctctggctccttagtcccttccccggggcaaagtcccccccacaaccaacattcttactccctcagccatctcacctcctgaacattgtgtctcccgcccgcactctccagggtttagagcctctccaaagggatgtttattccaaagatgccaatggggtcgctgctccccgaatcttctctgggtctcttggttcccccacgctaccccaggcctcactctgcatgtacacgcacacacacgtgcgtacatacacaccccttgcacgacgccagggcgagcagtgaacacacgtggagaggcagtgtagaaccccccagcctggctctatttggccgctggccgagtcttctccatttccatcctcccgccccgccccagctgagccacccacttctcctctccaccccaccgcagtccccaccatcgcgcagccccccgcaccgatgctcatcgagcccttcgagggacactcggtagtgaccctacttagcctccccggagctccagtctaacgcggaaaggctgagcagagaaccgcatggggtgggtggggtcacgcggtcaaggggctgacaatcaaggaaaacctttggtagggagtgcctgctgagcccggctcaaccgaaacccgagggctgagtggggaggttgacctggggaaggaagggtggttgcagaaggaatgataaggaccgatccccagaagtgagtgctttctctttgccgggaaactaaaggaaatccactaagtcaggatcagaggtgaaggtagggctctgagactggtggattaggtcggggccaggctatctgaaaagggcggtgcggggatcaggaaaaggggaaggaggaggagaagggcgtggggagctgggtcagacgcgcatacacacacacaccccttgcacaacgccagggtaagcagtgaacacaacacacgtggagatgcaatgtagaatctggccgctggccggatcttctctacttccatcctcccgccccagcccaagccacccacttctccagttgcttccctggggtgcatgcaaacctctagccttcagatgctgcagagagtccacttgagccgtgataaatggagattgttaagttttttcttttttataataaactcctgatttgaccagatgaaaagagaaaactctccatcgagtcctgcccttaggactataactcatatgtgtatacggtttcccttttttctaatcacaaatgggtgcatgtgtgttcataccaagcgcctagggccgaggacagaggctggctcagtaaatatttgttgagtaaacaaacgaaagaactgaaacttccctgaatctcgctgccgggggtgcctggagttttccgggggacttgggctgggcctggtggagggggctgcagcgaggctctcggactgggcgctggcctgcttttggcgccctgcgtctcaccctgggagtggggggctgcgggggagacgtcctccaaacgccgcccccttccccagctctgaacgagcccaccattgactacggattccagaggctacagaaagtcattcccagacaccccggagaccccgagaggctgcccaaggtactcagaggggcggggcggggcggggctgagggtgtcctgtgggcaagggggtgaggaggggctcccgagggccccttggtcgcccccaggggctgcccctccgtcccgctgtctctccccctgtccccaggaagtgctgctgaagcgggcggccgacttggcagaagccctgtacggagtgcccggcagtaaccaggtatggcgcctccgccctcccagcgccgccgggaccggggccccccagcacgcggcgcccgcggctgccccggccgtgccccgctcttgtcttcgcaggagctgctcctgaagcgcgcggcggacgtggccgaggctctgtacagcaccccccgcgcacccgggccgctcgcacccctggccccgagccacccacaccccgccgtcgtgggcatcaacgccttcagcagcccgctggccatcgccgtcggggacgccaccccggggcccgagccgggtgcgtgggccgcgcctccccgccgtcctcgggcgccgccaccgcccctccccggccggcaccgccccctgacggccgcgctctctctcgcaggctacgcgcgcagctgcagcagcgcgtccccccgcgggttcgcgcccagccccggctcgcagcagagcggctacggcggcggcctcggagctggcctgggcggctacggcgcgccgggcgtggccggcctcggcgtgcctgggtcccccagcttcctcaatggctccaccgccacctcgcccttcgccagtgagtgtcccccgcccgcgagggaaggtctggggccggggagcggaacgggactcagccccgcccccgcccatcccggagaggttggggcgccggcgccgtgagagtcgaccctggctcagccctcggggtcaggcccaccgtccccgcctgggacctcccctgccgcagaacctcaaccccacccctaggctgcacatcccggggtcctggggccagagtactccgtgcacttttagccttctttgccggtccgttatgcacatcgcttctaggcctccggtccccctgaagtgggctctaatgggtggcgggcgtccatctgaaacctgggacaccgcccccttcccatctcgcgcccggacttggggaggaggctggcgccgcctgccggaagcctaaggaaactcagggctcgagggaagccggcttccagccgccccccagctcccaggactccagaggccaggtgggcgtggggaggatgtggtccccgcgatgtcgtccggcagagcgagcgagttctgtgtgatcagacagaatttgagtttcagtgtccaaatcaggagctgccgggcattcagcaagttacttatttgaacttgtttcctcgcagtcaaatagggtcaattccaccccctgcttaaggttgatctcggatctgaatgtgccactgtgcctaaagggccagtgtgtgatttcggagtcccagccctgactgtgggcgctgaccacatcccatctggcttcttagagtggggagctcagagctgggtggacaggcaatgtctgcatgtcatgagtgagtgaccttccgaacggctttgatgccttgtcattttacactgccctcaagactcttccatcatcaagttccagatcagcatgttcacagctctttttagcttagctattcagcaggcatttataaagcgcccactgtatgcaaagcccagggcttgggggatccccccactcctgtcacctgcaagaagcctccctatcaatcataagagagattgtccctgaagtcccaggcgactctgccgagctggagaggtggtgaaggctgtcccagaaggaactggtcatggctttgcccgtggtgccctctcctctccctgtcccatatttgccattgccgagactgcactgtctgtccaccagcctggctttccttgcagggcgtgtgtcctgcctgctttctggctgaaggcttgagcctggccctgtcctctggcctgggctcaacttctgggacccaaggccccataagccagagtccacataggccatggccttctggtgtccctcccaaggcccctgcctctcctggctctttgctcaggccaggattgactgctcctccttcccttcagttctggggcagtaccctcacagcctctctgtgggcacccccttgggccaacactggtgggggtatggaacatcacatacactgtggtcaacagtagaggaacactctgccccagtgtgcagaacccagcccagctggggtcttctgattcagcaagaagatcaagaattctagagctgcttaaacccagcatcagctggagacacactggacttgagggagggttggtcccatttcatgatattgtcttgaccgaggcttacccaggtacccttccactccccacgttcagggtgctttgtggcccgactccaaggggtgtcattctcattgagtttgcgagaacattcctggagtgacatcagaactgccccagccagaggctcaggggctgtttgcttgggtctctctttgtttttctgcttcagccaccagcaaccctggaatgaatcacaactccccacactacctacccaaggtacaaaatgtggccgtgagccctgggcattgagagctatagtacattttctggcattggtctcaagcccttcatcgggctctggggcctctccagctggcagtaactgttgtcttaaaggagatgaggctgagggcatttggaagaggggcagctgttgaaggcattcttgtatcaagggaggtaggagggccctctgatgccaaaggcagccttctcaggctattgctttcttccaggaagccccacccaccccactgcctgctgcctggacaatactcagatcacagccttaccagtctttacaggagagaggcagggaattgggttcagatgaggatgtagaaaggtgggatccagcgatgccccaggcctgagcccccaggagaggaggctgcaggaagagggggcaggcaaagtctgtgtgcaggaggctcccttgccattcccaggagggcaagccgcagcctgggtggctagggagtttgagagcaggaagatctgaggatgtacatccctgcaatttgctttaaaattgaccagctggaagtgggagattcaggagaccacccccccccacagggcccaggctggagatgacaaggacctgcattaagctgtaaggaaacaaagtaccccagggtgcagggggaagtgggagagggacagaggagcatagggaacattggcaaggagagcatatttgaggaggaagttggagtgctgtttgtgatgctgggcagagaggcttataacaggagcctgtgcgttcccccaaacttcatccctaactacttgttccagctcttctgtgactcctgaactatgactctagccttggcaccccaagcaaggctcataaatgtttcctagcatctcagaatcccaggggttttcagcagaaatcctgaagtagtccagctgttgctcatctcatttttggggggtacctcccactgtttgttttttttgaatgttctggttttgcttttgtctttacctggtctggccctgtcatccccagccccgagaaaaggtctccagaaccgctgagaggtcagggctggcccaggaccctcacagctcccagtgagatctgagcctggtacctgtgtcagcagcccatgtggggccccagccaagctgctcactctggtgctgtctccctgttgtgtctcccaccaccttccctgctgcgcctgcccctccccgccccgccccggagtcatgccctctagccccccgctggcggctgcctcctccatgtccctcccggccgctgcccccaccaccagcgtgttctccttctcgcctgtcaacatgatctccgccgtcaaacagaggagcgccttcgcccccgtgctgcgccccccaagctccccaccccaggcctgccccagagcccacggagaggggcttccaggtgagtgatccaccctgcctcactgtggcaggaaggaagggcccttgtggagcagctgggctacaggggcctgctctgtccacatctcaccagtgcctcatgctggctaacctgctcttcttggaggacggagagcagggagctctgctggggtccagggaggtccctctggccccctctgccctggcctcccagcctgggatggtcaccattctggatgctctcagttgaccacttggccaaggggaagagactcaaatcacagttgatgaggtctagaaactaccccaacactccatccccatccagctgagcccagagcaaagaccctcagagctggtgggctgcacgcctgtacctgtgcctccctgtgtccaccagagggtagcacacaccactgtgagggactgggtcgctgaccatggaaggggactgaccttagaagaggcttagcccagcttccctccccgcattttacagattaggacttgagaccaagtcatcttcccacatcccattcatgaaatggctgttctctcactttacccatgtgcagcagaacctttgaaccagcagagcctttcctatccacgtggtgattggaaactcactgggaggacagaggaagggactggctgtggaaaaggaggaggcaacaggatgtgggtggggcagaacaggtccttgttgatggggatggtgggggccagggccagtgtcttccctaagaggcttacaggtgttttcttttctggctaagggatgcttccacgggatcccctaggactcaatctggcatgcagcaggtgtttaataaatagtcaaattattgaatgaatatatgagtcagaagggcaccgttcacacccacacagaaggctgcagtgcagtttgtggggcactgatctggaagaggttgggttagagcacgtcctattgagtattccccaagacaataatgggtcagagcaacagagcattaggaaagaatcagtgttgaaattacgtaagtggctactgaagaatttgtcagagcctttcatgtgccagggtacgttgtgaaccttctaggaaacaggagatgcaaatttatttgagcacaaaaatgtatttttctaacagcatcttgagattagttcctggggaatgaccttgagatgcaggaagagacaccctcatggtttcctcagcctgatgtaggggctgatcaggctgggatgcctatcacaagagcaaggccagtggcttgggccccagaaccatctccaaatccaaggcaggggcaggtggggcagcctccaggctgagacaggggagggggctgtggaaaatgctctatggagcctctgtgctccagggtccctgtatgagagtccggggacgctggaaagaggatgggaaagctcagggcctgggagaacaactgaggatgatacatgtccgcagcgtcccacagaatcggctaccctgagggcagtcagagcaactaggtgcagcccagaagcttctgagaactgtgctgatgccctgccctgcacacagaatggggtcccttcccaccagggaaccccctctgcacagttcaggcaggcctgtgatggtgactcaaacaataacagacttttgtgccagggagggcgggagggcaagggggctgcttggtgacccatccagagggtagcccatattcagggaaggacttgcccaagcaaggtttgaagaaggcaggggttcttagtgggggaggaatgccctagatagagtagaccttaggctgaaggtatgtgggtgggaaggcagagatttggagcccacgttcaaaacattaagaacataacatggccagatgcagtggctcacacgtgtaatcctagcactttggcaggccgaggtgggcagatcgcttgagatcaggagttcaagaccagtctgggcaagatggcaaaacctcgtctctaaaaaaaatagaaaaatgagctgggtgtggtggcgcatgcctgtagtcccagctactcgggaggctgaggtgggaggatcacttgagactgggaggtcaaggctgcagtaagctgagattgcaccattgcactccagtctgtctagcctggacaagagagcaagactctgtctcagtaaataagtaaataaataaataacatacaaatatatgccaaagatttatttaactcatcagtgagggagctaacaggatgacagagcggcttaaaggagacagtgagagactgaagccagtaaaacaaggagggctggaataagattgctggctgcaaactgcttctacagagcaataaacttgtaaccttcctctggggactgtcttttctaccaatgagaagtcatcagccatttctcagcctcctccaagtgaacatccatccaaccgagcaaagcctgggccctagccagtagcgtgaagtcaaaagacgtcacatgccccagaataagatgactcttaagatgggcttatttgataatgctctacggtggctttgaaaggatacacagtcactttttttgccttatttccaagttttggataatttttcttaggtgtgtctggagcttagaatgtgaaggatggagagaacagagggtcaccaatttctcctgccagcaaagagaaccatgggagggggtcaggtaggggtggggagtggtggagtgacaaacttcgtaggtgtgggaggcacagaggatgctgttgtgggtatgtcagtcagtattcctggaggctggcctctttccttttctgccctggtacatggccatgcgcttgaggaagcagatgggccctctgaaggaggccaccctgggagaaggagcctggggtcgtctctctcttgagggaggtagggagcaagggcgtgggctgcatcccctgagcatctgagaggcacccctcaccccgatctgcagtgctgccatgggccagggctagggatggctgactgccttcagaaagtgctatatcccctgcctgctgtctccagcccagagagtgacaggcaggtggcttcccaggtggcacatggcttatggctcctttttccttgactactgcagaccagtcttttgaggattctgacaagtttcactctccagcccgggggcttcagggcctggcatactcctaattacggtaggtctctggctgggtctggcctcccccgccccacctggccctgagatgtgcttgctctctaaaggccttcatcctgtgctcaagcctccccgctagcagccccacagggatggggagctggggtccaagtcttcctccccggggcccatctagacagctttctgaggtacttggcccaccccagtaacccaagctgaccaggtagagagaagtggcttcctgtcccctggcagccagccttcctccccgaccttcttctctccctctctcgccccaccaggtctgcagctgttcccatggagcccggactggaggtccctctgggattcacagccacaccccggatggtggcacagacagatgcagggccagggccatgggcggacctcaacccgtgagctgaacggggagaggccttcaccccatgctcaagcctccccgctagcagccccacaggcttctctcgcctccctgtcttggggtagtcagaagccccagcactgtgcagatgctcttggcaggacagcatcgcagggaggtgctgggattctgggcctcactgtctgggtcttggttcctctgaaagagatggatcttgtgcagaccagggttgttgagtgaggggagcgtgggatggggaccgtgggaaagaggacagctcagggagaagtgacctggaaaggtcctgtttgcatctgacccatctcaactggcccagcatcccaacttctctgcagcgaaagggtggcgccccgcagcctcgggaggcctgcccaggctcccgtggagcttccaacagctgcttggccccgcagctgcccccacttcctttgagacctgcactctcatgcttgccgcatcatgcctccctgtgggggctttgggcatggaggaggcagaagagggggtgccaggcctcctgtatttggggtcttcccccagtggatgtctcatggactctggccccacacactcacaatgactctggctggccccacgcagcgggcccagccgccccccaggtggcctcacattctgctctgctaagtttggagaaaacagaacaataaaccagatgcaggtggtgcccgcccggcctctcacctgcctccttggtgtgagtttgcttttcttagcagttcagcagctctaggggaggctccaaaccctgcccccggggagccctcttgcgcctcgggctttttaagcagccccagagttcgactaaagcaagtattccctgccccacgtctgttcttggggactgttgggggagggggagcaggctagcaggcctgagctctgcctgggagcataatagggccactgaggactcagctgcccagctctccagtcaagatcaaagtggtggttgtcaggacattgctgagaaccaggacagaccaaaccaaatatgacccagatgtccagaggctcagaaattagatccaatccaacacagaggctgcagggccacgcctgggctgggtggggcagcttgtggctcccagggctgtttatctgagctgcaccccaatcccatcccacggcccccacccccaggcctaggcaccttacggctcacctgcctcagagtttgggtggaaggagggtaaggaggcaagattcctatgcccattcgctccaccacccacccctctaggatgagtcccagttgtccccctgagatatgtcccctggatgatggtctggctgtctgaccctgaaagccacttttttgacccatgatccggtgagccccgtgtctagccccaggcctcaggctttcctctttctcttcctggccctgctcctgggctctggcctctggacaccctggccctttcaacccatgcgtccatgacctgcaaatgcagccttctggacaggcacacttgccagggcacatgggctggtcctgtctttcagaggcctctacttctttctctggtgttcttggctagcacctgggattcatctctcctggacacagggcaagaggtcatgctgccttctggtcatcctgtcccattctcagtgcttgcgtggcctcccactcagagcaccaaagcctgcctgcccacgccctgctttatttggctctgagcagctcccattgcccagggccctcccagctgaggccctgcaaagttctaatctgcactggacacaggtgataactggatagtggtcacactctggttcccaggatgggtcaggtgccatggtggatataaatgagacatgatgtctgtccctaacaatcccacaatgctgctcaagccaccatttgagtccacactgtccttttccttcatccacagcagacatagctaaccagttaccatgtttgcaatggcctggattgtgcctccctaaaatccatatgttgaagcattaacctcccatgtgactgtattgaggatggagcctttaaggaggtgattaaggttggacgaggtcatcagagtagagtcttgatccaatagaagttgtgctcttataagaagaggaagagacaccagagtgcactctctctgtcaggtaaggacacagagaaggcagccgtctgcaaaccaggaagagagccctcaccaggaatcaaatcaactggcaccttggcctgtgacttgcggcctctaggactgtaagaaagcaaaattctgtggtttaagccacccagtccatggtattttgttatggtagcccaagcaaactaatacaacatttttttttccatctgtgagctgagggctgcctccaggaaattaaccctttagtgtttctggcctgcccctccccactacatggaggaaaaatcaccagttaggctttgttgtagaatattgtcagcaaattctgggacagtaatccgagatgatgtggacagggcaccaagagcctctgctatgccacaaaaccaccgtgatgacagaatcattttcaacgaagctactgatcagagttgttatttgagatgaaaactattagccaagtcaatatcacaccaggccttcttgtagtctataatcagtgaggagcaagtcaaactgctgaccatgagtcagtacaagaccggcccaccagcaaaccggggcctgtgtctgggtctgtggcaccttctgcaaagcaactggggcatcttctgggccttgcaaatggaacacctttcagacttcccacatcctgtagtcaaagaggttccattctcaatagcacctgaggatgacattaagccaagtggcagaaacttggcctggagcttacataaatctgtagtggagacccactacccaataaatgctatcaaatgactaggtcttagtttagctcagtcctgaggccttgcacacaagtagaattgattggctcattggcattcatccctacagagcctggatatcccaggcaagtgatgaaaatcctaaccttagctccaattcctatgtgaatattggtcagggtgggatcattcgcctggaatggaagttgtcttcatttcagttcccccagcagcagaccttgggacaggaggtgggtccagatggtttatttgggcaacaattgcagaacgcaccggtcaggggagcagggaggggaggcagcagaaagaaggaagcccaatacagagtgctactgagcacgctactactgtgggtttttctgaagcttaatcccagctgggagctctgggaggctataaaatgcatacctcaggaatttcgcacctgaggagtgaggcagctggggtacttatacactaattctcatcagtcagtggttagggcttctggatggagtgggagggcagcactagctttctggcacctccagtcttccccacaggtggtaaaacagtcccagtagctagagaaaacactcagacaaagagaagcaggagctgacagttggaatcagacaggagtacacagaggaggtacagatgaggggatgtgggtggggcacatacctggaggtggtccctggcagtcatccaggggaagatggttttttctacttaaagtaagtttggagtaggcatggatttttcctatatctgcagatcccacctctacctggcaccaggtgacaaaaactgcccaggctatttcttgttgaagtaccaagatgccaggtgacaaaggggtccctctcagcgtcagcccacccccaggcttctaatgggggtgggaatagaaagggcaccagacgcttggctgctcaccgttcagagagagtgcatctccagtaagtcctctgctttcctcttacaaatttttcccagcagaaccaggctgctacactttgcatctgaccctggggaccagagagcttctggggctacattttggctcagacaggacccgctatagacaggtctcactggctcaagagaagccaggcagcagctttgaccagccctctgctgactattctgcaaaatagcattctccctgccccctccccatattggcagagccttttaacttcttccaaaaagaaaaatcccctagagaaatggaaactgctgcgcagtgtggaaaggatggtcttttaaaaatatgacgttagagcccaggcagctatttgggaggctgaggcaggaggattgcttgagcccaggggtttgaggccagcctgggcaacaagtgagacccccatctctcaaaaaagaaaatggtgttgggttaattggatagccatatgcaaaaattacatttggcctctacctcacaccatacacaaaaatcaatttcaggtggattgtggatggaactgtgaaacctaaagcaataaatctttacgcccctgaagatagactagaagctttttgccagagtgatatccaaggtctgtttttctacccatgtgaccaactttggaatgaagcaagcactggacatatttgaaatggttcaaatggaccctaaagtctcttttcacttctctaggagaacttttccaaataggaaaaagttcacagttcacagtgtctttctacccgaggagagactaggtcttcatggttagtgatttcccaaagctcttaactgcttatcctgggccagccgccttccccaccctgtccacagctccctcctctgctaccacctcagtggtagtaacaacactcactgggtgatggaagggaatgggtcacctccttggagccaccagcctagaagttggccgttcacaagaagaccttcactgtgagagtcctgatgggggcgaggcatcgaccacaaatatggacctagcatcctcttatcacttctcccatgctccccttctcttcactcttactaagaggtgtgtgtgtgtgtgtgtgtgtgtgtgtgtcagggtttcactctgtcacccaggctggagtgcaatggcacaatcatagctcactcctgggttcaagcaaccctcctgcctcagccacttgagtagttgggactacaggtaccacacccagctaattttttagggggtaagagatggaggtctcactatattgcccagactggtctcaaactcctgggttcaagtgatcctcctgcctcagactcccacagtgctggtattacaggcgtaagccaccacgcctgccttcattatgagattttctttttcttttcttttctttttttttttttttttttttgagacagggtcttgctctgtcacctaggctggagcgcagtggcacaatcacagctcactgcagcctcagcctcctggctcaagtgatcctcccgcttcagcccccagagtagctgggaccacagtcacgtaccaccacgctaggctaatttttgggtgtgtgttttgtagagacaagtttctccatgttgcccaggttggtctcaaactcctgggctcaaataatccacctgcctcagcctcccaaagtgctgggattatagttgtgagccacacacccggccattagatttttgataaccagaatgtcttaattgaatgtagtctaagttattaatcttttctttatgattagcgtttctcgtatgcttttaatttatgtattattttgcttcacgcttcacctccccttttgtgtgcttttaaacaaatcttctgccaggtgcggtggctcacacctgtaatcctagcactctgggaggccaaggtgggcggatcacctgaggtcaggagttcaagaccagcctggccaacataatgaaaccccgtctaccccgtctctgctaaaaatacaaaaattagtcgggcatggtggcgcatgcccgtagtcccagctactcaggaggctgaggcaagagaatcacttgaacccaggaggcagaggttgcagtaagctgagatcacgccatagcctgggcaacagaatgagaccccatctcaaaaaaattaattgattaattaaatgaaattaaaataaaataaattttaaaatcttcacttacaccaaagtcaagaagatattttagaatttttcttgtttgtggcttttatatttaggtccacaatccaactaaaatttatttttgtgtacagtgtaagctagagatcaaatttaattttttttcatatggttagccaattggcccagcaccatttactgaaatgagtatattttcccccacttcattgaagtgaaatctttgttataaatcaaatgttcatatatgtatgtgtctgtcctggattctctattctgatccatttgtctttttatctagccttatacccgtgccacattatcttaataactttagatttatagtatgttttgctatgtagtatgtatggcaagtcatccaatttaattcttcctttcaaatttttttatttttatttttatttttttatagaaatagggcctcactatgttacccaggctggtcttgaacttctggcctgaagtgatcctcctgccttagcctcccaaagtgctcgtattacaggcttgaaccactacacccggcctgttcaacttagttcttcacaattatgttggctacatgtggtccttttcatttcaatacaaattttatactcagtttattaatttctattttttaaactggcaggcagattgcctgagctcaggagttcaagaccagcctgggcaacacagtgaaaccccatctctactaaaatgcaaaaaattagccaggcatggtggcatgcgcctgtagtcccagctactcaggaggctgaggcaggagaatttcttgaaccctagaggcagaggttgcagtgagccaagatcacaccactgcactatagcctgggcaacagagcaagactccatctcccaaaaaaaaacacaaaaaaacctgctggattttcattgggattacattaaatttacagactaattaatggagaattgatgtctttaaaatattgtgtgtttcaatctatgaatattgtatatccctccatttatttagatcttttaagacttctcttaataatgttttatagacttctgtatgaaagttttgcacctatttcatttatttctatttgattattttgtgatattataaatagtatcattttcttaattttatttgttgtgaatatatagaaacaatggatttttgtataattaccttgtatccagcaatcttgcttagccacttatccttagattatcttgaattttcttagctacatagttatgtcatctgcaaaaaaaggacagtttcatttcttcacttgcagtccttacttttttatttttacttatttttcttgcttaaatgcactggctgcaacctccaatacaatgttgaatagaagtagtgagagtggacatctttgttttgctcctgattctggagggcaaacttttaatattccatcattaagcatcgtatttggtttatagatatccttctattcctaattttctaaaaatgtttaaaaattataaatagatgccaaaatttgtgaaatatttttcttcatgtattaagtaatcaaattactttctccattatttcgttaatgtgctgaattatattaattacatgtctaattttaagccactgctttagctaattgtatgtttaattgtaaatggccatatattcttttttttttttttttgagtgcaatggcacgatctcagctcactgcaacctcccctccctggttcaagtgattctctcgcctcagcctcctaagtagctgggattacaggctcacaccaccatgcctggctaatttttgtatttttagtacagatgagctttcaccatgttggccaggctggtctggaacccctgacctcaagtgatctgctctccttggcctccgaaagtgctgggattacaggcatgagccaccatgcctggccttattctttatacagggtataccaattattaacacagagcccattttctctttctctctctgcactactctctaagaaggcactcactggccctcgcccttacccgcttctcctggaggagctaggctttctgcagaccacctcggtacctcacactgctacactggctttggctaccttctaggagcagtggagggaaaaacacaagaacaaacacaaattaatctctcactaagtcattctactttgactctaacccatcttttaccattctattctaaccattaagattcaaacccagctgggctccttagctctgggtcccctctgttggaaatccagaacagtcctcgtgagtcctctgttcaggagcccctgaccactcacttccaaaggtgaagatactcaaagcttccctccttgcctcaccttggcagggggtcacagagtggcagcctcaggagggtgggaggtcctgggtttgaagctgcagagactgccaagcagaatgggtaggagggtctcagagacccccactggagacagaacggaagagaattcatggctctaaagatgcaggagaggctgcctagcagggcaggaacagcaacaagacggttttatttgtatacattcctttttgagtattttattccttgagagagaaggcgccaagtgtttatgggggaaggaaagctggccgtccagtagcagatttgctgttccctggggctcagcatcccagcatcttcattctccaaagcctctcctgcccctcccctgccagcctgggagcgagcgctgccctgatgcaccctcatctggtggggtgtgaggaggaggctcgggctaggctgccgcagctccgggcagtcatcccatgagtccagttcctgaagggctgattcgtgtagggcagaaaaaccctctggcttggctcctgcccctgctgcctctctgggggttccacccatgtaggagcctgccccctccacgcacccacccgctcacccagaactgagttcacctttaggtgggtgggggaggctccagccactctcaggctggcactgcctcaagcccagccagcgctggcttctgtggtgaaagctggtttgtctgggctgctccccagggccttcctggagctgggcctggaggctgaccttgccaagacaaactgtggctgccggtggaatgtggtcgagtggctgagcaggcccaaacctggcaggtctgtccatggtgcccctgcaggttccacaacacagagccctacagagtcaggtggggccaggagcaggtaccgagagacttctgggcatctctctgtcccttgttgagtgaggacggggcagcatctcttttggtctcaactgaaagtgtaaaaggctatcatcaagtgtgaaggttgacagaattcctcaacccacttcctctgggaagcagctgtgcaggagaagacatggtggggagggggtgcggggaggagtgtgtgcctgtgtgggtgtgggcataaagcaggagctgccaggggaggagaaagagctctggcaagacctcttcttcccttaacacagcccggtgggatggggctacgttgctgttagagccagagtttaatttttttttttttgagacagggtcttgttctgttgcccaggttggagtacagtggcactgtctcagctcactgccgcctcgacctcctgagctcaagcaatcctacctcagcctcctgagtagctgggactacaggcatgtgccaccatacccgactaatttttctattttttgtagagacaggggtctcactatgttgcccaggatagtcttgaactcctgccctcaagcaatcctcctacctctgcctcccaaagtgctgagattacagatgtgagccactgtgtccagccagatccacaatttgttcagcccataccatcagcccattattttagcgggggttccctggacgcagagcctgaaatggggatttgtgtgcacatgaaagggctctctggacaaaaaggagagaagaaagcagaacagggtaggggaaagagctgggcaagtctctgcaggaggctagcacagtcccacgcggagcctaagcatgaagggcacctcagttggaccctgccatgacaaggagatgcctctaatatccctgagcctgtcagccactggttggaggctgccagaggagagtggagagtgaaacctcctgggcaaagcagctcccatttggccaaggacaatacttgggagaagggggcagctgtgagctgtcagcagccaacactcaccccagttggggatgagcacactggctggtaaggatctggtggaactctaagagcctccactgcacccctctacctagtaaatccgagaccaggagcgacgcccgtctttataccagccctacttcttgggtggcaaggactccccttctgtttcaagtagggcttatagggaatgtcctgggccattgacaaacaaagggcaggaatccactcagggagatcaggtgatgctcaacagagctgtgcagcagaggtggacacacacagcaagcacgcagttgactcaatcatagtcactgcttgggagggccataggtgctgtccacatcagctctgctggctcgggacacccatcattgccttggatgtctctaaaagctgactcgctcttctgcctgtcctcccacctaccccctacccaggctgaaccccatttcccttctcttctacctcccagatcagtgacgctgagccagtccctaaggtagggtgagggctggcagtcttgctgttgctctagtctctttccaagatatcgccttggcatctgctcctgcttccctgtggccttccattttcatactcaagagtctgtttccaggccaggtgcggtggctcatgcctataatcccatcactttgggaggccgaggcgggctgatcacttgaggtcaggagttggaaaccagcctggccaacatggtgaaaccccatctctactaaaaataaaaaactattagccgggcggggtggggcgtgcctgtaatcccacctacttgggaggctgaggcaggagaactgcttgaacccggtaggcggaggttgcagtgagtcgagatcacgccactgcactccagcctcggtgacagagcaagactctgtctccaaaacaaaacaaaacaaaacaaaacacaaacaaaaacaaaaaaaaggagtctgtttcccaaacaaaacaaaaactctgagtctgctctgtttctccctctgcaatgcccggcagcaacactaatttcccttaggcaatagggacactactgactaagtaggggaagctcacagaaattagaacaaagtggcgaagggaagtccaagggactcaatccagtgcccagagaggaaggacagcagtgtcctctgggagggtgagccccagaaagaggcaccccactggaaatatgacaggaggtggaggaagctgaagagaaaagaaaacgtgtgaaaagcacctcatgctccaaagacaaacaaaacaagaaaagtagagacttcccagaagatggaatgatgtaggtttgccatttcttctgctaagtctaatttaaaaccctggatggctcacgcctgtaatcccaacactttgggaggcccaagtaggaggatcacttgaagccaggagttcgagaccagccagtgcaacatagtgagaccacctgactctacaaaagaaaaattagccaggcgcagtagtgcgcacctgtagtcccagctactcgggactgaggctggaggatggcttgaggccaagagtttgaggttatagtagcaccactgcactccagcctgagcaacagcgagaccttgttgcttaaaaaaataaataaataaaaatgaaaaataaaaccctggacattatatataaaacaagcataaacagattctggggggagaaaagggttctgaatgggggagaaaaagaggcagatgatttagaggcctctgcaccccaggaaagacatggcagagaatcccctgggttttctttctgttccacatatcctagatttggaacttaagaaactggcaacacagcaatgccatggcatgccaaaaaataaaaaaaagctccaataaaaacctgctcctctagccaaaggaccaagtgaacagcaacctagtaaggctgaaaccgagacacaaaaaccactttacttcagccaagccccacagaataaactgagaccccacctacatccgcacagcaaaggcgcagtggggagcctaaattccaccctcccaaggctgcagtgaggttccccaacgaccatcaccagagcagtgccagtgaagaccgggcagagagttgagccatccatctgtgtcagccagcaaaggggcctcctccgtgctccacggtatcactagcaccaccaccacgctgggaaccacgtgaagaacctggatttccggcctgtactccccagtaaagaggcgcctctcccgcttcctgctgagatgtgtcacaggaagccttgtggagagtcaggattttcgccatggcccagagcaatttattagaccacctaccctgcctcttcgccctccagcggtggtgtcagtggagatcacaactggagtcagacttcccacctttgcccatcagtaaaaaggagcacctgccccctacaggtgtcaatataggtcattttttactcccacctggcagggaagacccgacctcacccctcccgaccctgccttgccctgccagacagataggtgtcagaaaaaagtcagctaaaacataaagtttatatttatctattcatatttttcaattttatttttaaagagacagggtcttgctctgtcatccaagctggagtgcagtggcatgatcacaactcgctgcagccttgaactcctgggctcaagcaatcctctccactcagcatcccaagtagctgggactacaggcatgcaccaccacgcctggctaaaacataaagtttaaataagatccagagtctggtaacacaatacaaaaaggtccaaatttcaggccgggcgcagtgactcatgcctgtaatcccagcactttgggaggccgaggcgggcggatcacctgaggttgggagttcgagaccagcctgaccaacatggagaaaccccgtctctaccaaaaatacaaaaatagctgggcgtggtgactcatgcctgtaatcccagctacttgggaggcagaggcagaagaatcacttgaacccaggaggtggaggttttggtgagccgagatggcgccattgcactccagcctgggcaacaagagcgaaactccatctcaaaaaaaaaagaaaaaaggccaagtttcaaccaaaaatcacttgtcatgccaggaaccaggaagatctcaaaccaaataaagaaaggccatctattggatgtaacaccaagatgctagaattaaccgatgaagatattaaagtagtcatgatcaagatacttcaacaaacaactaagaatatgcttaaaataaatgaaaaaattgcctcagcaaagaaatagaaagtctctgaaaaagtagatgataacaagagccaaatggaaacactgaaactgacaaaacagaatcactaaaattttaaaattcagtggatgggctcaacaacaaaatggaaggtacaaaggaaaaaatccataaactcaatgacagaataatagaaatggccaaatctgtaaagagagaagagaaactgaaaaaaaaaaaaagataaagagaacctctagagactgtggagctataacgaaagagctaatattagtgtcactggagttccggaaggagagcagggctgggtgtggtggctcatgcctgtaatcccagcactttgggaaactgaggcaggaggattgtgtgagctcaggagtttgagaccagcctgggcaacatggtgaaaccttgcctctacaaaaaatacaaaaattagccacatgtggtggcatacatcttagtcccagctactcaggaggctaaggtgggaggatggtttgagtgtgggaggcagaggttgcagtgagctgagattgcactgttgtactccagcctgggcaatagaatgagaccctatctcaaaaaaaggaaaagaaaaagaaagaaaagaagaaaaatactggaagaaatagtggctgaaaatttgccacttatcactcatgtcataagggccttcagccactgaaacactgttttcattttttttgggggggggtttgttctgttttgtttttttgtttttgttttgagacagagtctcgctctatcaccaggctggagtgcagtggtgcgatctcagctcaccacaacctctgcctcccaggttcaagcaattctcctgctcagcctcccgagtagctgggactataggcacgtgccaccacgcccagctaatttttgtatttttagtagagacggggtttcaccgtgttggccaggatggtctcgagctttgacctcatgatctgctcacctcggcctcccaaagtgctgggattacaggcctgagccaccctgcctggcctctgtttttttttttttttttttaagacacattctcactctgtctcccaggccggagtgtagtggcacgacaataacttactataaccttgaacccttgggctcaaacaaccctcctgctcagcctcctgagtagctgggaccacaggcacgtgccatcacgcccagctaattttttaattttttgtagagatgcagtctcgctatgctgcccaagctgatcttgaattcctggcctcaagcaatcctccttccttgacctcccaaagtttgggattacagacatgagccactgcgcccagccctgaaacactttttgaagctcgtattagtaacctaataagtaacctaagccatcagaggtatctatatttcatatagctgtgtttctaataaagctgtaattaaaagaacatttgtaacttaaagttctaagttgtctcaggggttgggtcactatattgagtgtactcccccaattcttctcctcacatgcagattttagtaagtgatagttttaaattaaattttgaacctgtgctttgctttgttttgttttgttttgtttttttctgatacagggtctcactctgtcttccaagctggagtgcagtggcgcgatctcggctcactgcaacctctgcctcccaggttcaagcgattatagacatgtgccaccatgcccgactaatttttgtatttttagtagagacggggttttactatcttggccaggctggtttcaaactcctaacctcaggtgatccacccaccttggcctcccaaagtgctgagagtagaggcgtgagccactgcatcctgccaagcctgtgctctttgttgcctccatactgcttcacaaacatgggggcattgagcttggaactttctcgcagaggctgaaaccacctttgtcttcctctccatggaaattaaataggtttcatgtcaagcatagtacatatgatgtctgtacaaattagaaaaaggtgtctcttcctcaagccccccccccaaaaaaagtgttatgttaatatttattccttaacgacaataattaagataaacatacaggagcacttgcccctcccccaaagccgacagccttcgtgtcacctgatgtattagctgaagcagtattcctgggtgagaaatgtgttgtttccagaatccagaggccaccaagtgctgtgcttccttctttgtggcaggggatacaaaatacagcaattagtctctaactttggaggagctatcctggcatgcccttggccaacagaccccgtaaaacttgaccaaaatggcaggtccctgaaccctcccagagtttatctcctaccatctggattgcatgtgtctcaccaaggcctccagtgtgctagccatgttgtgctcatcctgcccgcctgcatgacgtcagtaacataaaggatcactgcagtgtctgcatgacatatggatagtacagagaccttcaaactatattatgatacagaccaggaaaattaacatagccctagggcaaaacactgagtaaatatttatgtgaatgaggactgtttctgatcttcttttctaattgggatggaactctaatataaaatccaccaccgtaacaaactgaaagagagaaaatatacggtcacctcaaaagatgcagaaaaagcatttgacaaacctaacatctgctataaaaattctcagccagctaggatgagaagaaaacctctacaacatgataaagggtatctatgaaaacctaacagctaaccctaaactgaatgtttttgccctaaaatcaggaagtaggcaaggatgcccagtcttaccacttttgtttgtgcttctttgatctgaaaatatatggctttcacaaaatttgagcagttttcagccattgtttcttaactttcatttaatatagtactagaagccctagcaagtgtgataaggcaagaaaaataaacaaaagtcttaatattgaaaggaaaaaataaaattattcccactcacaaatgatataatcatctgtgcataaaatcctaaggaatatatatatgtatatatttggaaaaaaacagctccacggccaagcatggtgcctcacacgtgtaatcccagcactttgggaggccaagacaggagaactgcctgaggccagaagttcgagaccagcctgagcaacacagggagactccatctctacaaaaaatgtttaaaatggccagacatagtggtgtgtgcctgtggtcccagctacttgggaagctgaggcaggaggatcacttgagcccaggagtctgaagctgcagtaagctggatcgcaccactgcagcacacagcctgggcaatagagtgagacagctgtcaaaaaaaaaaaaaataaagcttctaactaatattcaagtttatcaagatcacaagatttgagatcaatatacaaaaatcaactacatttcaatatattagcaaggaacaattaaaaatcaaatttaaaaaataacacctgcatttgtttgctaggactgacattaaaaagtaccacagaccaagtggctaaaacgacagagatttattttctcacagttctagagggtggaagtcaaagatcgaagtatcagctgatttggtttctcttaaagcctctctcctggccctacaggtgcctaccttctccctatgtcttcacatggtggacagagaaaactcttgtgtctctctcctctctttttttttttttttttttgagacagtctcactcagttgcccaggctggaatgcagtggtgcaatctcggctcactgaaacctccacctccctcgttcaagcgattcgcctgcctcagcctcctgagtagctggaattacagactcgtgccaccacccctggctaatttttgtatttttagtaaagatggggtttcgccatgttagccaggctggtctcaaactcctgacctcaacagctccgcccaccttggcctcccaaagtgctgggattacaggtgtaagccaccacgccagcctctctctcttcttaaagggacactagtcatactggattagggcccacccatgtgaacttaattacttctttaaggttctgtctccaaatacagtcacaatctgaagtcttgggggttaggacttcagtatatgaattggggtgaaataattcagcccataaaaataccattgataagagctcgaaaaatgaaatacttcaatataaatctaacataagatgtgcaggatctgtatgctggaaactacaaaacgccaatgaaagagctagaagaagacctaataagcgaataaacacacagtgttcaaggattgggaagtacagtatagttttgttttgttgttgttgttgttgtttttgttttttttgagacagagtcttgctctgtggcccaggttagagtacagtggcgcgatcttggctcaccacaatcctgcctcccaggctcaagcgattctcctgcctcagcttcccaagtagctgggactacaggtgcttgccaccatgcctagctaatttttgtatttttagtagagacggggcttcactgtgttggccaggctggtctcgaactcctgacctcgtgatctgcccgcctcagcctcccaaagtcctggattacaggcgtgagccaccacacccagccttacattatagttaagatgccaattgtccccagattgacccacagatttaatgcaattccaatcaaaatcctagcaaaattctttggagatagacaaggtaaatctaaactgtgtatggaaaggtaagaagacggtaatagccaaaacaagtttgaaaagaaaaaggcataggattcacactacccatttgtatgtgtatgtgtgtgtgtttcccagattgatgtttgttgtttgtttgtttttgagacgaagtcttgctctgttgccccggttggagtgcaatggtgcaatctcagctcaccacaacctctgcctcccaggttcaagtgattctcctgcctcagcctcccaagtagctaggattacaggtgcacgccaccacgcccagctaatttttgtatttttggtagagacagggtttcgccatgttggccaggctggtctcgaactcctgacctcaggtgatccacccgcttcagcctcccaaagtgctgggattacaggcgtgaggcactggacccggcctcccagattgttttattgtggtaaagcatggataagatgaaatttaccatttagctttttttttttttttttaaagaaatggagtctcactatgttgccaaggctagattcgaactcccgggctagagtgatcctcctagctcagcttcctgagtagccgggaacacaggcttctgccaccacacccagctctcagccatttttaagtgtataattcaaattcagtggcattaaatacattcacaaggttgtgtagccagcattactatctatttccagaacttgttcatcattccaaacagaaaccctgtacccactggacattaactcctcactccctcccccaagtccctggtaacctctattctactttctgtgtctatgaatttgcctattccagttacttcatataagcggaatcatatatttgtccttttgtgtctggcttatttctcttagcataatatttgcaaagttcatccttgctgtagctgcttgtgtcagaattttattcctttttatggctgagtaatattctattttgtgtgtataccacattttgtgtattcattcatctgtttgaacacatgggttgttttcaccttttggatattgtgaataatgctgctgtgaacacttggtgtacgagtatctctttgagtcactgctttcaattctttggaagaatattgagaagtgaaattgctgggtcatattgtaattctgtgtttaactttttgaggaatcactgaactgtttcccaccacagacgcaatgttttacattctagcaatgcacaaacgttttgatttctccacatcaccaacacctttttgtttgtttgttttgttttgttttgagacagtctcgctctgttgtccaggcttgaatgcagtggcaccatctcagctcgctgcaacctccgcctcctgggttcaaggaattctcatgcctcagcctcctgagtagctgaggctacaggcaagcgcccccacgcccagctaatttttgtagttttggtagagatgaggtttcaccatgtccgccaggctggtctcaaactcctggcctcaagtgatccacctggctgggcctcccaaagtgctgaaattacaggcatgagccaccgtgcccagcccaccaacactttttattgttaattttattgatagtagttattctaatttagggtgtaaagtggtatctcgtttccatttgtatttccctaatgactaatgatgttgagcattttttcatgtgcttattgggcattcgcgtatcgtctttgaagaaatgtttattaaagttccttgtccaggccgggcgcggtggctcacgcctgtcatctcagcgctttgggaggccgaggcgggcagatcatgaggtcaggagatcgagaccatcctggctaacacggtgaaaccccgtctctactaaaaatacaaaaaaaattagctgggcgtggtggcgggcgcctgtagtcccagggctgaggcaggagaatggcctgaacccgggaggcggagcttgcagtgagccgagatggcgccaccgcactccagcctgggcgacagagcaagactccgtctcaaaaaaaaaaaaaagttccttgtccatttttccatttttgaattaggttttttgtttgtttgttttatgttgagttgtagaagttctttacatattctggatatttacatttctgcaaatattttctgccattctgtgggctgtcgtttcattctcttctttgatgcacaaaagtttttaattttgatgaagttcaccttatgtttttttctcttgttgactgtactttggtgacatatccaagaaatgattgacaaattcaatgtcatgaagatttttcactgcttttttctcctaggaattttatggtgttagctcttcagtgcagggtttgatccattgcgaattaatttttggatacggtgcaacaaaaggatccggctgcattcttttgcatgtgcacactacccggttctaagatgtatcataaagctaccaatagtcaaggcattgtgatattggcaaaaagacaaatgccaatggaacaaactaaaaattctagaaatagacccacataaatatggtcagctgatttttgacaaagatgtaaagacaattcaatgaagaaagaacagtcgtttcaacaaaaggtgctggaacaactggacttccacatgcaaaaataaaaacctagacttacatttcatatatatatataaattaactcaaaatatatgataaacgtaaattaatatgtaaaactataaaactcttagacttaggagaaaatattcgtgacctttggttagtcaaagagcttccagataggacacaaaaacaccatctataagaggaaaaaaaggataagtttcactttctcgaaatttaaaacttctgctctgcaaaaaacactattaagagaataaagttgtttcctttcgtcactgcagcagcagctgtatgtccaagcttcagaagagacttgcctctaagattctccactgtggcaaaaagatggtctggctggaccttaacaagaccaacgaaatcgccaatgccaacacctgccagcagattcaaaagctgatcaaagatgggctgataatcccaagcccctgactgtcctttcctgggcttcatgcaggaaaaacaccttgacctgccaagagggcaggaatatgggcgtaagtaagtgaaaggatattgtcaatgctcgagtgccaaagaagttaccctggatggggaggatgcgaattctgcatcagctggtcggaagatactgggaatctaagaagactggccaccacatgtatcacagcctatacctgaaggtgaaagagaacatgttcaaaaatacacggattcttatggaacacatccacaagttgaggtctaagaccaaggaagtatacaaatatattcacctgccgtccaagaaggttcatcaaggctcagtccaaggagaaagagacaaagaaaaacagcgcccccaccctccttgtctgtactcagtggcctcagcaattacatagaccaatcactcaaataaaacaagtctcttttttttccttaagaaagtgaaagagagaatgaaaaaacaaaccacagattgggagaaaatatttacaaatcatatatcagaaaaagcacttgtatctaactctcaaaacttaaaaataagaaaagaaacaatccaattttttttaaatgggcagtttaaaaaaactctgcagttaaaaaaaaataaaaacaatccaattataaaatgggcaaaagatataaacagatatttttccaaagaggagatttaggtggcaaataagcatgtgaaaagatgtccaacatccttagccattagggaaatgcaaattaaagccacactatttcactgtacacctattagaacagctaaaataggtgcgtaatgaacagctaaaataacaagtcatggtaacaccaagtggtgacaagtacgcagagaagctggctctctcgtacattcctgatgggaatgtaaatggcacagacactcacatacacttactatatgatccagcaatcacacccttgggcatttatcccagaaaaatgaaaacttatgtgcatacaaaaatctgttcttgaatgttcctattagccctatttataatagcaaaatactggaaacaactcaaatgtcctttaatgagtgaatggttgaacaagctctggaacatccatataaagcaatataattctgcaatacaaagatatgaactatcgaggcatgcaacaaccttgatgaatgtcaagggcattatgcttagtgaaaaaacagtccatctcaaaaggttacatgctgtattattccattcctataacattctctaaatgacaaaactatagaaatgagagaacaaattaggagtaagcaagggaaagaagtggagatgggggaggcagggacacaaatacaaaaaagtaacataagggagttctttggtggtgagggagcagttctatatcttgatcgtggtggtggttacacaaatctatacataggataaaatcttacaaaactaaacacaacacacacacaccacacgcacacaaatggatacagggttttggggggttttttaatgccaaaaactgaacgaggtctgtaatcgagttgactgtaatgtaccaatgtcagttttctcatttggatgtttgtgttagtttgctagggctgccataccaagtaccacagactgggtagcttaaaccaacaaaattattttctctgccaggtgcggtggctcacgcctctaatcccagcactttgggaggctgaggagcgtggatcacctgaggtcaggagttggagaccagcctggccaacatggtgaaaccctgtctctactaaaaacacaaaaatcagccaggtgtggtagcaagcacctgtaattccagctacttgggaggctgaggcaggagaattgcttggacccgggaggcggaggtttcagtgagccgaaattgcaccactgtactccactctgggtgacagagcaagactctgtcttgggggaaaaaaaaattatttcctcacagtattggagtctggaagtccaaggtcagcagattttattcctcctgaagcctctcttcttggcttgtagatggatatcttctctctatgtcctcacgtggtcttccctctgtgtgtatctgtgtcctaatttcctttgtttttttttttttttttttttttttgaaacagggcctctctttgtcacccaggctagagtgcaatggttcaagcaatcctcccacttcagcctcccaaagtgctgggattacaggcatgagctaatgcacccgacctcctcttcttataaggacaccagtcatattggagggaccatctgtttgacctcatttgaccttaattacgtcttaaaagaccctatcaccacatacattctgaggaagttggggttaggactacaacatatgaatttgggaggaagacgattagggccatacgatattgtactacagctatatgtcacccactggggtaacagtcaaaagcgcatggatctctttgtactatgtgaacaacttcctgtgaacctataattatttcaaaataaaaagttggccaggcatggtggctcacctgtgtagtcccagcactttgggaggctgaggcgggccaatcacttgaggtcaggagttcgagaccagcctggccaacatggtgaaatcccatctctaccaaaaaatataaaaattagccaggcatggtggtgcgcgcctgtagttcccactattcaggaggctgaggtgggaggatctcttgaacctgggagggggaggttgcagtgagccgaaatcacaccattgcactccagcctgggcaacagagactctgtctcaaaaaaaaaaaaaaaaaagtccgggcgcagtggctcacacctgtaatcccagcactttgggaggccgagttgggcagatcacgtgaggttgggagttccagaccagcctgaccaacatggagaaaccccatctctactaaaaatacaaaattagccgggcgtggtggtgcatgcctgtaatcccagctacttgggaggctgaggcaggagaattgcttgaacctgggaggaggaggttgcagtgagccaagattgcgccattgcactccagcctgggcaacaagagcaaaactccgtctcaaaaaaaaaaaaaaagaaaagttaaacaatggggaaaagatgtaaagacattacatcaaagaatatatatgaatggcaaataagcacatgagaagacgtttagcataattagtcattaagagaaatgcaaattaaaaccaaaatgagaaatcattgcatgcctattacgataactaaaattaaaaatactattgatacctaatgctgatgagaatacagagcaacaagaactctcataattgcttgtgggaattcaaactaatacagtcactcaggaacagtatcttatagttacacatacacgtatcacatgacccagcagtcccacctctaggtatttatcctaaagaatgaaaagtatattcacacaaaaacctgtacatgttcacagcagcattattcataatggtcaagacaacctaaaagtccttcaatgggtaaatagagccacaagatgggatactgctcagagataaaagggacaaatgattgacacgccacaacatggatgactctgaaatgcattatgctaagtgaaagaacctagactcaataggttacatactttatgattccacttacatcacactctgggaagggcaaaactacagccacttcggttctcttttggttactgtttgcatagctttttttccatcccaccttcaacctatttgtgtcttcgaatctgaagcatgtctggtgaaaacaacaaataggttttgtttttcctttttctttttcttttttctttttttttttagacagaatctcactttgtcccccaggcttgagtgcagtggcgtgatctcagctcactgcagcctcaacctcctgggttccagcgatcctcctgcctcagtcccccaagtagctgggactactggcatgcgccaccatgcccagttaatttttgtacctttagtagagacggagtttcaccatgttgcccatgctggtctcgaactcctgagctcaagtgatctggccaccttggcctcccaaagtgctgggattacaggcgtgagccaccgtgcctggccaacaaatagttgagtcatattttttaatccattatgtcagtctctgctgtataattagagggtttgtttgtttgtttgttgtttgtttgtttgtttgtttttgagacggagtctcgctctgttgccaggctggagtacagtggtgccatctccgctcactgcaacctccgcctcccggattcaagcgattctcctgcctcagactcctgagtagctgggactacaggtgcgcgccaccacgcccggctaatttttgtatttttagtagagacggggtttcaccatgttggccaggatagtctcaatctcttgacctcatgattcgcctgccttggcctcccaaaatgctggtattacaggcgtgagccaccatgcccggccgagggtttaacccacttacatttaaactgatgaggtaagatttacatctgccattttgctatttgttttctgtcttcttttattcttcttcttccattgctgccctcttctgtattaaataaatattttccacagtatctttttaattcccctgctcttcctttcctatatattttttgaattgttttcttggtggttgtgctgaggattacaataacatcttaacttttaacatctaggttgggttaatgccaaattaatttcaattaataccaacataacttaatttcaattttctctcatttagttccatttctcccctcccctttgtgctcttattgtaatacaaattacatttttaaacactgtacactcatcaatgcagatttttttgaaaacagttttgagataaaattcacaaccatacaattcatccatttaatgtgtacaattcaactttttaaaatatattcataagtatgtattgccatcagcacagtccattttaaaacatttttatcacctaaaataaaaaattaaaaaggccaggtgcagtggctcacacttgcaatccaaacattttgggagaccaaagcaggactatcacttgaggccaggagtttgcgagcagcctgagcaacacagcaagactccacctagtcccagctactcaggaggctgaggcaggaggggcccaggagttcaaggccacagtaagctatgatcatgccactgtactccagcctgggtgacagagcaagactctgtctcttaaaaaaatgaaaataaaaataaaaactgttctctttagctatcatccctcttcctcaattatgcccagccctaagcaaccactaatctgctgctttctgtctctatagttttgcctagtctggatatttcctacaaatggactcatacactatatggcccttgtcactggcatctggcatcttctacttaacataatgttctcaaggtttatccatgttgtagtatgtatttgtacttcattcccttttttttttcttttttctttatatatattttttcagacagggtcttactttgtcacccaggctggagtgcagtggcgccctatcagctcaccgcaacctctgcctcccaggttcaagcgattcttgtgcctcagcctcctgagtagctgggattacagacatgcatgaccacgcccagctaatttttgtatttttaatagagacagggtttcaccacgttggccaggctggtttcgaactcctgatctcaagtgatctgcccacctcaacttcccatagtgctgggattacaggggtgagccaccatgcccggcctttacttcatttgtgaaggatgttttgctggatttagaattcttagctgacagtctttttctttcttttggatatttcctcccgctcctttctcctccaccaccccagccaccatggtttccaataagaagtaagctgttaatattactgaggattccttatacatgatgagttgctcctttcttgctgctttcaagattttctctttgtctttggctttgacagtttgattataatatttctagatgtggatatctttgaaattgtcctgctgagagttcgttgaactaaagcaaaagtataaaaacaggaaatagatcagcggttgcctagggttggagtagaagaaggatccgaatacaaagggacagcataagggaattctgtggtgtgtttctttttttttttgagatgtagtctcgctctgtcgcccaggctggagtgcagtggtgccatctcggctcaatgcaacctccacctccccagttcacgccattctcctgcctcagcttcccaagtagctgggactacaggcgcccgctaccacgcccggctaattttttgtatttttagtagagatggggtttcaccgtgttagccaggacggcctcgatctcctgaccgcgtgatctgcccgtctcggcctcccaaagtgctgggattacaggcgtgagccgcggcacccagccctttgatgtctgtttctatgagggtggtggtagtcgatacaagaatctatgcatgtgactcatagaactgtacatcgaaaaggtgaattttatcatatgcatattttttaaatgccaataaatgaaaattgataatttttttttttagatggagtctcactctgtcacccaggctggatggagtgcagtggcatgatggcagctcaccgcaacctccacctcccaggttcaagcgattcttctgcctcagcctcccgagtagctgggactacctggctaatttttgtatttttagtagagatggggtttcaccatgttggccaggatgctttcaatctcctgaccttgtgatccgcctgcctctgcctccccaagtgctgggattacaggtgtgagccaccgtgcccggccgaaaattgataatttttaaaaatacttagtatgttcactcaacgctgaatatatatttttattttatttttttgaggtggagttttgttcttgttgcccaggttggagtgcaatggcgtgatctcggctcacagcaacctctgactcccgggttcaacctcgtacctcagcctcccaagtagctggtattacaggcactcaccaccaagcctagctttttttttttttttttttttgtatttttagtagagacggggtttctccacgttggttaggttggtcttgaactcctgacctcaggtgatctgctcacttcggcatcacaaagtgctggtattacaggcgtgagacaccacatctggcatgaacacatatgtttaagtgaacactcatgtactctcatccaagtaagggaaaagcacattgtgagcattccagaagctccctatgttcttctccctgaatgttgcctcattgctcccccatagaatcaatcacaattctaaattttatcataatcacgtccctgctctttttttatctttttttgtttgtttctttgtttttgagacaggatctcactctgttggccaggctgggatgcagtggtgcaattcctgctcactacagcttcaacctcctgggtacaagcgatcctcctgcctcagcccctcaagtagcttgaaccacaggcacacaccaccacaaccagctaatttttgaattttgttttttagagaccaggtctcgctgtgttgtgcaggctggtcttgaactcttgcgctcacgcaatcttctcgccttggcctccctcgctgctgggattacagatgtgagccactgtgcccagctgttctttatctttttattattcatgcatcactaaaaaatgcaattcttttccttttgcattttgcttatttactcagaattgttttgcaagaatcatctatgttttgtgtactagtttacttattttcattcttgtataactcaattgcacaaatgtaccatattttattcttcattcttttctccttttttttttttctttttttttttgagacagggtctcactctgtcacccaggctggagtgcagtggcgtgatcactactcactgcagcctcaacctcctgctgggctcgtgatcctcccagctcctcctcccacgtagctaggaccacaagtaggtgccttcatgcctggctaatatttgtattttttgtagagatagcatttttccatgttccccacactggtcttgaactcctgagctcaagcattccacccatctcagcctcctgaagtgctgggattaaaggtgtgagccaccacacctggcctcttcattctatttttagtggacatttggatttcttccaatttggatctatttcaaacaaaactgctatgagcattcatgtacatgtatcttttgtatgtgtataagagtttctctatggtatatattatatatctaagaattgggcatgtgtgtctttaatgctactagattatgctgaggtgttctccatcttctcataccacacatgtcaaatggaatgcaagagcaaatacttctaatgatatgtggtacagacacaggtaagggtttactagaggaaacttccaggcaaagagttggaaaaaaatgtatatgatgccccaaattccctttatccaaaaggaagcttgcttaggtcaggcagggctaaactcactgttgaaagagttccaggagagtggacaccttctcatgacactctacatatttacaaaggcaagcgagggctgggggcccctggaaaactagcaacaacagatgaagatttctggccatggaaatgtcttagctgtaaatgaagagaatccagagcttggacatcacttggggagctcacatgccagttcagtcatgctgaactgttccttttgtgaaacgcatgttcacatcttttgcccattattatattgggttatttattcttcttggggtttgtcaggattcgtgtacctgtgaattggtgtctttcatcagttctgaaaaattctgttagcatctcttcaaaagttgctgttggactgggcacagtggctcacacctgtaatcccagcactttgggaggccgaggtgggaggatcccttgaactcaggatttcaagactagcctgggaaacatggcaaaaccctgtctctacaaaaaatgcaaaaattagctgggcatggtgctacatgcctgcagtcccaactacctgggaggctgaggtggaaggatcgcttgagtccaggaggttgaggctgcatgcaatgggcagtgatcacgccactgcactccatcctatgtggtagagtgagaccctgtctcgaaaataaaaaataaaaaattgctcttgactttggtggtggctaatgcccataatctcaacacttggagaggctgaggcagaaggaccacttgaacccaggagtttgagaccagcctgtgcaacataggaagaccccgtctctacaaaaaatacaaaacttagctgggcatggtggtgcatgcctgcagacccagctactcaggagggtgaggtgggaggatcgcttgagttcaggaggtcgaggctgcagtgagctttgatgactgcactctgggtgagagtgaggccctgtctcaaaaaaaaaaaaaaaaaaaaaaagctgtctctcaccactcttcctctcttcacttgtcagcttttcttccatgtcttttaacatctcttcaatattttctatctctttccacattttcctctatctctctctgtcctttccccagaaaggatattctcttctgtcctaacttctagctcattaattctctctttaactgtctaacccactactatacatacccattcagtttttagtttaggttattgtatttttatttgtagaaattgttaggttatatagatatagatatatagatataaatatatattttttgagacgggagtctcgctctgtcgcccaggctgactgcaaactccacctccgggattcaagcaattctcctgcctcagcctcctgagtagcttggattacaggcacccaccaccatacctggctaatttttgtatttttagtagagacagggtttcaccatgttagccaggctggtcttgaactcgtgacctcaggtgatctgcctgccttgacctcccaaagtgctgagattacaggcgcaagccacagcacctgacccaaatagctcattttaacgtttttttttttctctaatctgaggaggcatcttgtatgacttttattttacacaatgtgaacatggttgttttataatctgtaactggtgattcaaatgtattaaatctttgtaggtctagatctcctatttgttactgctgcctcatttccttgatttttaatgtgatgcttattgtacttaaaaaattatttgtatgacaattgagtaacaagtttactgatgtaaaattttcggttcattttaaaaattatgtgtcacatgtaacagactgaccgatataaaattctctgttcattttacaaacagtgttccctaaagttgtacaatactgtgatcctacttatggatattctacaatatttcagataatataggctgaccagccaggcacggtggctcacgcctgtaatcccagcactttgggtagccgatcacctgaggtcaggagtttagcctggccaacatggtgaaactctatatccactaaaaatacaaaaactagctgggcgtgatggcacacgcctgtaatcccagctactctggaggctgagacaggagaattgcttgaacctgggaggcggaggttgcggtgagctgagattgcgccagtgcgctccagcctggacgacagagctagactctctcataaaaagaaaaaggaaggaaggaaggaaggtatatagacagagactggtccatttaacttcattttaacatctctttggcttgacttcctataatgtaaaggctggaaagctaaaagctaaatatcccagcttcttttctacctggcattcctcgtgtaacctaggtcctgtcaaacagatgcacaggccctgaacttggagctaagaatggcaaaaggaagtgtcaaacacattcagggagatcagattttctgacagtcatggtagtggagctgtatggtttctttggtacgaatatgaaatgttctggcatctagtccccagtatcttagttgccaaatataaagcaatggtgaaagtgattatttctctaggaatattcccatgacatacatggttggggattccctcttgcctttgttgacactgactgtaacgtttctggttatggagcatccaagtccagtttccagccctcctggagagtgtgtgagcttcctaagaccctttaatcaatccctttctgcttatttagagtgctatttagagtggattctatcatctacacctaagaacacttatatccaatgaaaccaaaatagaatccaagaaactgtagaacaaactcaagagtacaataacaagaaatcctagacaaaaaagcaggcaaagttaaactatgatgttagatgtgaggatagtggttacccttgacagacaggggtattgactggaagggtacacaaagggagaattttggagtgctggtagtattggggttttttaaacctgggttatgggtccctgagtgtgctctgtctgtgtacatttatatggctgtgaacttacatgcacttttcattatatacgataaacttcaatgaattaaaaatctgtttttgaaaaatgacactataagtggaggtgaggagaaaaggtgcagggaaatttggtactagatccttcatggcgattaatggatattgacgctgtgtgggagagacagagacatctcaagaaacagtgcaagagccaagcagtaggcagaacttacatggcaaaaggctgcatgatgtctttatgccagattttgcctattactatttgccccattcctgtccttggaagctctactctgaatgacaagggggttgggagactacattttgtaggcttccttgccagctgagttactgttagattttgccagtggacttcatagctcagggactagaaagtgggaggaaatgagaaacggtcctgtttctggctctagccatggcaggtgattgcctgtggttgcaagcagtcacaagtgattacaagcctccagcaccatcagcaaatacaggttataagcaccagaccaagggtgctatcctgatttctgggtaaaattcccttccttttgttcatccagctcttttttgtttattttgttatgaccatccaggttggagtatagtggcgccatcatggctcactgctgcctctgcagcctccacctcccaggctccagtgatcctcctgcctctgcctcccttagccatgcgccactacagctggctatgtttcttatttcttatttttgtagaggcggggtttggctatgttatccaggctggtctcaaactcctgggctcaagcaatcctcccacctcagcctcccaaagtgctgggattacaggtgtgagccaccacacccggcctcatccagctcttccaacaccttcctatccaatttccagcattaaatttccctccactttaagtgcctagaatgggttgtttacctggcaagacacagactgatacacaacttccccttcagtctgatagaaactcagcaaagcctatcagttatcaatactctgagaatggctgaagcaaattcaaatgttctcagctgacccacctttggctgaccctcctccttggagccatccctgtccatactccacaccctgcccacctcccgcctgaacttctagagccactacttctattgcatccttgactgccccagtcctgttgatgtgcagtgctgtatttcacgtgtgcagctcccctgcactctcacggcacctggcctccaccctagcatgtctcacaatgtaccgaactgtcctttcccttgactaggagccccaggagtttgagtgcaggcacggctgatcctgattccttgcacacctggcaatgagcaggcgcttacagaatgcctggcagcagtgtaatggtacctgtagcagaagctgatcagaagaaatgagttgctctgccaggcccttggttcaagaagagcccaggtgggatcctcttttcacacaatgtgtccagaagccaactgatgagagtgtgcaagtgtgcagaataggaactgagggctgggccgaggcccgcccccggggggaggacctggggcacagagacaacacgaagatgagctaaggtgcccggtagctttaatgagcaccttttcctcactttgtccctccctctctactcttccccttcccgtcttgacaggtccagcctgccctagggctcttaaaccgcaggtatcaatccttctgtccccttagccgctccaggcgcctgcgaaggtccgggggcaccttggccccagctgccagcagctcgcgcagcctctgtttgggagtcttggtgagcacgaaattgcaggggaaggggccctcttcaaaggtgacccgacagttccgtgtcactgaatggtagccctcggcactggcagtcaccatgtagtcccctggggtcagcagacgccaataatccccgccccacgctgaggagagtgaagggcacgatcaggacccaattaatgatcttctgcttcttcccgagcctccagccctccagccccttcccttgccctcccggtcaaacacacccgtggtcacgtcatggttaatcccatccacggcaatgacagcgtcagcaatcccaagctccgtgtccttgtccctcaccactcctgcaatgcccatgcgcacctgtgtgggaagaggttatcagagcccttccccttcggcaggataatgtgctgtttagctaacttgctggctctgttgccctgcaaacctgagcaaagtggtaggtctactgtgttcctaggtgacactacttctggaagaaaaaaaaaaaagaaatcctgattgacaaatcacatctggactaagaaaatgataaatacctggtaggaaggcttatctatccttgggctttcccaggttattgggcttgtctttggtagaccctttggaagctctgcttatggagctattacaagggttatgagctccatggaacatgaagcttctatgccaggacagctcctgcacctgcctcacgtgagtctctcctgaggatagctctggggcagcgccacggaccaccacctagactgcaatggaggctcctcccaccggctctaacacgatgccacgctgccagcaaactgcacttcctgtcctgtgtgcttccaagacaatctgataccaagcatggcccatggcatcttgtgagtctgaatgctcagctggaccttagaagaacccctggtaggagctgtagcctaaatggacagcaggagtgattcaggcaggctgggggccgggacgcagatccgacctgctccaggtaggtgaggagggcgtctttgttgttctcccactcctggggcaattcattctcgtgagggaacttgtcacaggacagctccacagtgacctcaaagcagttggtgtgtaggtagctgaagtcattcatgcctaaggggaccacagacactgctgcctaagcaggcgggatgcggtcccatcctcccgctaccctcccttctctgagggacacttcagagtgggaacagacgccagcactgtacgcaaccgcaggctgtcttatcagggcgggggttacggggccagggctaactccaccctcaggcacatactcccggggaccgtgtgccagtcagccccgttgatgatgttgccgtgcacggagaagtcctggctgtggcagggtcggcggctggtgtcctgcatggccagattactgccagcatagacagtgctgagccagcgaaacacagcatcatctggtgtgggcgtgagctcgcgggcagcccacggggtgcgagtcatgtcgaatgggtaggacaccacgagctcacccccgtggaggttggcacttagcacaaaggggatccgcttcatccacttgattactgcccgcgtttcaggagccacctggatggggcaggtcaggaggggcaggagacagagacaaggtccgccccccacagacctccactgccgccctcaaaatactcacggtggcattgggcagggtgtagtaagtgggcaatggcaggtgatggttggggacgatgtggggcaccttcccatcgtcctgtgcttcccacagtggtgtgttgaggtcagcaaaattatggttaagatcgatgctctggttgttccagcggccctcggcccagcccaccagctctgaaccctgccgggcaagaggcttgttcaagtcgagcaggtccagccaccagggcagaaggacagagtggccctcatgctgggtggcctacccggtggtaggcgatctcatagccatcagggttcatggagggcagcaggtgaatgcgcatctcagagagcagccgggtcacccgtgggttccctcgcaggaactcatggcacaggaactgcatcaggagcagaagcaactcccgccccagggcctcgttcccatgcatgccagccacgtagcgcacctcaggctcccctggggacacatgggggcttgcagcgggttcatgcctggggccctgccctgtgcctacctctccccactccccatgccagtacccagctcatgctccccaggcttgtccgacatttccatcacatacagcttcaggccctggtagctcttcccaatgctgtagatgcgggtgatgttggggcattgctcttgtacctgcttcatcagctggtgggcagagtgtagcgtggcatgaggcatgggaggggtacacccaggggcagatcacatgtgccatggaaagacttaaaaagtcagcgatggcccacacagagggggcatcccatcatggtacaggaggggagcggcagcagagccgggaggaaggggtaggactgggggggcgccataataagggaaagtgggatggagcttaggggtccacaggagagaaggctgagacatcaggaggcagcaggggcatacaagcgcagtcacagcaggttgtgccccggtgggaaggtgggaaggggacctgagatgggtgggccctccttcccaggtcataggggttatatctgaccttcctcatggccttgtaattgtgatgctgaaagtctagagggtcagaggatcccgacgcaggggcctcaaggaataggtcattggggtctggtggaggttgagtttatggtaaagggtgtgtccacagtgaaggatgcaccctgcatccaagccctgcccaaccaaccctggcctgactgcccacctgagactgggcaggccaggatctctgcccggaggcaaggcgcgcctccctggagccaggtctggggcagcaggcgaatgaagcgggccacctggggctccggcaggaggttcagcactggagtttctgggtctgaattggcaggaaatacctgggggcagcaagttctctgttgtggctgctcaaaccccagaagcctggcccaggacccagggaaggagctcaggcctccaagcttactgtctccccaccctagtgggctcagctagagacttgcactgtgcatcaaacacagaccccggcccacagcccctgccaatgggcagccctaggcagccttgctctctggattggacacagttcattagaccagtttggccacatgactcgggggaagccaatcctagagctggccaggactccacattgtagcctgctgtaaaaagaggtccatgagatgcggaagtcagaaccacgagaaggcaagaagtgatgtggaccagaggccccgggccagaaggggcacgccaggaggaagctgtaccgtgaagcagcacccaccctgtggtggcattatctggggaggatgtgggcatgtcccaaagcagctggctcccaatggtgcctgccgtgtgccaccctcttgacaacaagccacacccccctgggaagcctaagctggcgtctattccttgtcctcagaggagcctcagcctagcctggactgggtgcccaactcccagcatggaggccccagccacagtgggaccactcactgcgtccatcccactgctgtggttcctacttccccaccaggtccgactgtcattgctgaactggaccttgtatgatgtgacccagtcatacctggcaggagaggtggagagagatcatcggtgcccccaggactcccaccccagtccttctgtgacctcctgacctagggttagtctgcctcacctccagacagagttcctgccctgtgtgataacacccgagaagcgggtggggtgcccagcgtccacctgaaaccatggatcggcgtcctgctcctcagcacaccaggctccatcatatagatcgccgtcctccaggcctgactgcagacacaggacatggtggtcaggcccagttggacagagtggggcaggccaggacagagaggaggcaggagagaagctcccaggggctgccttccctaccctgagaccatggctccgagccaggattactgacctgaatgttgagccgtcctcggtgtggtccaagaccaaaggactggctgctggatgcctcaagccggctatctgaaactcgcagggactccagacccaaaggaggacagcctggggcggggatagaacagtgagacaggaccagagggagggtagccagggcaggtgggaagctgagcctaaggttgctcctgcgctaggcaagcaaggggcgtgccggtgcccatgaggccaagagctgtgctggtaaagtgccccaggggctgcaagtctgggctgggcccctggagaggaagtacctgtttcttgtttctcagcggggtcgagggtccctgctggagtgggggtcacaaggggcccggcagtcaccagtggggtggggcgagttagagttagcttcttccgcttcttcataatgacctttttcttcttgatgactcgaatccggacatgctgttctgaggtcccttggggtccgagaggcacagcatgggggaaaggaagaatggtgaaaccccggatggaaaggtctgccagcccaagaagacatgtgagcccacagcaggccacaccaccaggatctaacagccttcacaggacatcaaaggcctgcaatctgaccccaacctgcctctccagtcacttccttggctcctccttctcctccctgatgtaactacatgcttggccagcctcccctgtgaacctctaatccaatggagagctgcacccagcctctagaaactgttcggttgctccaaagagctgagtctggcactttacctccgggcctctgcactagctatcccctcccctgtaatgctacccctcgcctctgattttttcacctaattcccattcttcctttgcatctcagcccagatgcctttccaaggaggctttcttagctccagactcagcatcatgccccaaaacccctgtgccgcttccattgttgtgtctgctctctgggctcagatggcctgtcctggaatccatgtctgcctgggtgtcgaggctttcagggctgggcctgcccgccggcccttcagcacaaggctctgcccaggcaggtgctgggggtacccatcgaagctccacagctgcctccagaacaggctgcccatttccgcatctggtgcccctgtgcctttgcccgccgcttccttcttggcagccctctctctctctctctctccagactcccctgactcggggacatcacccttcaagaccctcctccacttgcctcctctagaagcccctgagtgccctccgcttgcgctcctcctctcctattccacatctggaaagctgggaggtcgggctgccttcctctcccgctctgccccatcctcccggcagcctcagcgaggggctctcccttctttccttttgttctttctctccagccctcgccttcaaactctctcctacgcagtcttgctctgcaccttgagagcttctgcccctctgtctcccctcctgccagttctggcctgttttgtctttggtgaaaagggaaggtttggggcttggaagaggcagcatcccactggcgcctgtcctgggactgctgactaggtctggcagggaactggggctgccgagtcagcagccattgctcccagcagggagttgagggagtgtgagtgtgtatatgtgtgtgtgcactgtgagtgtgagtgtgcgcgcgcgtgcactgtgtgtgcgcgcacgcgcgtgtgagtgtgcgtgtgtgtgcatgcgtgtgaatgcgcgcgcgtgtgagtgcaagtgtgcgcgtgtgtgaatgtgtgtgagtgcgcgcgcgtgtgtgcgcgtgagtgcgagtgtgcgtgcggggtgagtgtgcatgactgtgagtgtgcgtgggtgtgcgtgtgcccgcgtgttagggagggatcgccccacggggcaggagagccgggcagtcggcttgcgggggagcggaccgtcggtcggggaactcaccgttagctgtctccgccggcggctgtgccgggctgctatgcagggccggggtcgagcctgggaccttggtggtcccgggctgcgcgaggcccagcaccgagttcctgggcgcccccagagccgggccgacggccggcgcgaaggcggccagggcgagcaggagcccccacatggcggggattgagtgccaggggcgcgcgggctacggcgggtggcgggtcggtctcttcctgccgagtgcgccgagccccccgccccttcctgccccccgcccctccgcagcctcctgcccgcccacagcccgctgcccgcctcggacctcggagaggaggagagggccgggaggagcgagcggggctgacctccaaggggccgccccaagtctcaggaccgccgactctgcccttcctctccgccgtctggggccaacccgcctcgttggcgcgctgcgcctttatagtctgcaaagccacactgaagagaccagagatcacctggtggccatcaagtcgaccaacaggaggcaaagccccttatctgagcaattcagaatgacacttccctattgtctaaagccacatctggtaccaagcttccgtcccaagaatttataagtaactagaatttctgtacgtttccggaatgagtgcacgttaagacccattgtgcaaactttgctgacatcaaggcaccaaaatatcgacaaatgtaaccatttaccatgacctaagtgactaatgtggtccaaattaccctgcagttccccgcagggagctcagtcctctcttgctgaagcgcctactgcgctctgctgcctcgtcctttccgtctaataaaactttccttttcagacctacacggttgttgataagttcttttaccacccgggagccaaccacttcccggttccggagctctgacacctcgcctggcatcttggtggcccatacggggacttcactgggatttccctcttcctttttctctctgcttccttccacggtctggttctttactctttggggaactgccggtcccggtggaggcagctcttctgtgggatcctgaagccctagagaagggatacctggctgtccttgcccttaggggtgagggactggccagggctcttttctgttttcggactgccagtgaaccagcttgagttctcgttggcaactgacagtttctggccaagcgccatcccccggtattaccccaaggccaagacaaaagagctattgcctgtcagagtggcagggcactttcattttaacactccataagccttgtcctggaagcggtggatctcaattctacacagggatgcctcagggatcttgtagttccttgtctaaacccaacttcggttcaattaattcagttccatccaactcgcccttggattgcctccttaaaaatggtcccattggtctcattttgacccacaaactcttaaaaataagcatataaggctgagcacaatggcttatgcctgtaaccccagcactttgggaggccaaggcaggcagatcacctgaggtccggagttaaagaccgggagtctactaaaaatgcaaaacttggccgggcacagtgactcacacctgtaatcctagcactttgggaggccgaggcgagtggatcacctgaggtcaggagttcgagatcagcctggccaacatggcgaaaccctgtctctactaaaaatacaaaaaaaaaaaaaaaatcagccagggggctaattatatgtggcgggcacatataatcccagctactagggaggctgaggcaggagaatcacttgtaccccgggggcggaggttgcagtgggccaagatggcgccacagcactccagcctgggcgacacagcaagactctgtctcaaaaaatacaaataaaaaataaataagagtttaaaaagcatatccttttttctaatattgcttgggttcaatacaagctccctaatcaatcaatttggccaattaatgaaacttgggattgcaatgctactttacaacttaactgattttttgccggaaccttggaaaggattcagaagtcccatatgttcaggtcttttttgctttatccccaaatccaaacccaaaattacatacaaattgtcatgtatgcttccaaggaacgtcctcccttcccggttctgatgtcttagatgatccttccttttgcctattacatcctcctcaacctgctcactcttcacctacaccctctccatctgctccattccctagtcaatctcccacccacatacccaaatactttctccccttcacatactctcaggggagtcacatatgctactagtacagagtcctcagaaaaatccccaaaatattttgcctctccctaaggtggctaatgaagatttgggaacaagccaagttcatgtcccttttctgatcatgtctgatcttttgcaaattcaatccaagttgggttcatttagtcaggatccctctaagttcattcaagaatttcagactttaactgttgcctttgatttaacctggcaagatgtatttgtggtattaactacctgctgttcccacacacaaaaaatcacacgtgtgatcttcagcatgggcagatgaagctcatgctcccagtcctaataacagagctgggcagaagctgtccccaacatagaacctattggcaataccaggccaccaattctggcccaaacagaggtaagggcagacaggatcatatggtaacttctctgttggagggaatgaaaaatatataataaaacctgttaatttttctaaattataagaaataatagctgggcgcggtggctcacacctgtaatcccagcactttgggaggctgaggcgagcgggtcacctgaggtttgagaccagcctagccaacacggagaaaccccatctctactaaaaatacaaaatgagctgggcatggtggtgcatgcctgtaatcccagttactccagaggctgaggcaggagaatcgtttgaaccttggaggcggaagttgtggtgagctgagattgcgccactgcactccagcctgggcaacaagagcgaaattccatctcaaataaaataaaataaaaagaaataataattttgtatgtatgaaactatctgaaagccctgcccttttccaagctagactggtggaggccatgcataaatacacaaattgagaccccaggggccaggtgtggttgctcacacctgtaatcctagtactttgggagaccaaggcgaggcgggcggatcacctgaggtcaggagttggagaccagcctggccaacatggtgagaacctgtctctactaaaaacacaaaaatctgtgggcatggaggtgcatgccggtaattcctgccttttaatgcttatatcttccagcttacaatgattccacctacagatgactatgcaatcccaataccagcctgcaacagcaacttctattttcatggggcctcttgatggaatctggtcttccctccatgaacaagtttatcatgacccttcattcccttcatgacagaaagcaagaaaggaatcctttcaatgccccttttcagcaggaagtagccagatagactggacacccctcttcactgtgccattttccctttcttgggatcctaacagacaagtagacatgagcatggagaaatacaaagggtcaaagatttgcccaaaatatttatcagggggaaaatgaggagagcaaggatcacctggtggccatcaagcagaccatcaggaggcaaagcaccttatctgaagaactcagaatggtactttcctattatctaaagccacatctggtaccaggcttctttccctagaatttctatacatctccggaatgcacgcatgttggaacccattgtgcaacctttgctgtcatcaaggtgccaaaatgtctacaaatgtaatcatttactatgacctacaaaactaatgtggtcaaaattacccttcagttccctgcaagtgagctcaggcctctcttgccgaagcatcccgctgcgctctgctgtggagttctttccatctaataaaacttttcaaacctatactgttgttgataaattcttttaccacccgggagccaaccattcgtggctgcggctcccggggctctgacacccagcctggcacacaacatttcacttagcccctcgaggcccttagcctgcagcagacatctactttgtaccatgcactatgccaggagttttacacgtggccgctcaatcaaacttcattttacaaactgataaactgaggctcagagcggctaatgacttgggcgaggtagcaaagctgagaactttgggaaggaaactacaaccggagaggaaaagctatccagagccagaggccccctggcagggcgggtgggacagaagggggaaaagagtgaagggaaaatgaggcggcggggggctagggggcgacccggagcctggggagagggctggtcccggaatcctccagaaagacaacccaaggggcccaagaagaggcggcacggcggcgcttcccaccaccaccatcaccaagcccggccctgcccctcctctcctttcccttccctcccctactccttcgctcactcacccggctgccacgtcccgtcccggggttacataacccggagagagaagcctgagcgatagcctgcgggctggggctgcggtggaggagccaagggttgatgcactgcctgacctgccctccggctcctcgcccccagcccgtattctcctcggggagccggcagccctgggtctgcccagatccggagatgcccttcccgccctccctccaagaccccctttggatcctgcattcctggtcatctctccagaaggaaggaaacgcgtccagcggtgtgcctttggccggcgcttggcctttgcaaagggctctccagggagatgctcccatccccacgaggagcgatgcccagaagtggcccgcaatcctctggcgtaagcggggccctgcgcaaatgttttttgcaggggcactatctgtataaatgatttgaatcacccaaaagcagcttgtgggcaccattctggcagcccacgctcacacgaaccccagaaagaaatagcgcgccgcagtctgggactggggcccaccgccggcagggactaccccataggcactggtcctggagctcctcgaggcatctggtctgccccacgcgcgcagggtgaagagctagaggacccccgaaagggagtgaccccacagggcccacgtgcaactgggtcccgcctcgcagccccctgcctcgacggcgctgccgggtcccaggcactggatgggaggacagagagacatttcaagggaagcgctgcacagccgggactccctggacgccaggcaggggcagatgggcagcgccgatgcttcccgaaggtgggaggccgcagtctgaacaggtcccgagggctgctaagcgtcccgccaaagcccaatctggccacctccaggtctctggtccccacacccatccaggtttctcgggtgttgggaagaaaggagggggcacaagaaacaggacatctcagcctcctgaagcccacaccccctccaagccgttccccacacagtaggcaaattctgtcaagttcctccaggcttaaggccccagtgggttcacctgcaaggtcttcatgaccaagttcttcctgcccacgcctttcccattccatctgcctccctatcccctggctcccatccccccagtcactccggcattctagctgctcctcccacgcaacagcccaactagcctcctggccttttaatttgtgcatggaatttgccttctcagtcagatttcctttcaatatcacctgctcccaaaggctttccctgactaccctgactaaagcaaactttttcacttcacacactctatcctcccacccgtttaaattattgtcttcaaggcactcaacaccgagatgatcttgctttacttatgtgttggctgttcaggttcccccacccccagcaggaggtaagtaccctgccagaagaactttgtacccaaatgtccacagctgcacctcagagcctagaacagcacctggtccctcgtcagctctcataaagtgtgtgtataatatattcaaggttagagtggacaaaccagggctgaaaggacctcctcaacagtgccaggatttgcaggagaggacatggcaggccgtgaactgaaagaccagttcccaaagtgactagggtggagcagctggcactctcccaccaatcttttaggggccagggctgcaggatgctccacctcttttttcttttattctttttttttttgagacgagtctcactctgtcacccaggctggaatgcagtggcgggatctcagctgactgcaagctccacctcctgggttcacgccattctcctgcctcagcctcccaagaagctgggactacaggtgcacaccacctcgcctggctaattttttgtgtttttagtagagacggggtttcaccgtgttagccaggatggtctcgatctcctgacctcgtgatccacccacctcggcctcccaaagtgctgggataacaggtgtgagccaccgtgtgtggccgggatgctccatctcttatgtctcctgcacccagctcccatcccccttcccaccactctgcactccctgcccctgtcctctattgcaacccttaggaccccttggttccctgctgtgtctcctgagccccgcagcactttctcacactcttctccactcccagccctgctgccacccctggcccttgccactggctacctggggctgcaaaggtacaagtagcaggatctggaggtgatagctccaggggcagaggggcaggtttgcacccaagtacctgtatagccagatctcatctaccaggagccaggtagaagatctttcgtggtctcactaggtgcaattgagaaggactggatagtggcacccgcctaaaagggattttaatgtaaggggtgggctaggaatctcctgccaactccctggtgtggttaggtggttggagggggagaggataggtgactctggtgacatacaggcttcgtttcacatcccacttctgacgtgtattttgtttggctatccttgggcagtagtttcacctccctgagacttagtttcctcatctgtaaaacaggaaccatatccttctcccaggtttgctgtgatgataaagtgagataatatagggtcttagggggctcctaggttgatcagatgcattaaaggtggggaaaacagtgtaacacagccctcttactcctacatacttagatggaataaaacagtatcaaggaaaagaaaggaagctctgtgtccagctgcacaaataatgaagtagaatctactgcctgcctgtgcctctaatctcctgtgcctggatgctaaagcagaactcatttcctgctaggtgctctccctgtgatgtaggtgagcattgttggagcctcacatgggaccaggatgcacaggggagcatctccccacgcacccgttctcccctcatcactctctaccccagctttctctcctacatacatcaaggtctttgagagccttgctccacaaagtgtggttgaagaccagcagcagtagcatcccctgggaacttgttagaaatgcagaacaggccgggtgcagtggctcacgcctgtaatcccagaactttgggaggccgaggcgggcggatcacctgaggtcaggagttcaagaccaaatacaaatacaaaacttacctggccaacacggtgaaaccccatctctactacaaatacaaaacttagctgggtgtggtggtgcacgcctgtaatcccagctattcaggaggctgaggcaggagaatcgcttgaacccaagaagcggaggttgcagtgagctgggatggtgtcatgcactccagcctaggtgaaagagctagactctgtcaaaaaaaaaaaaccaaaaaaaaaaccaaaaaacaaaaaacaaacaaacaaaaaaaacacctctgccccagacctattgaatcagaatatgcatttttttttttttttttttttgacagagtctcactctgtctcccaggctggagtgcagtggcccgatctcagctcactaaactgccacctcccgggttcaagcaattctcctgcctcagtctcctgagtagctgggactacaggcgtccaccaccacacccagctaatttttgtgtttttagtagagacagggtttcaccatattggccaggctggtctcgaactcttgaccagaatctgcatttttaacaagacctccagaggattcaaccccaggagatacatatgcgtgttgaagactgagttttatccctggtatttgatgctgtcacgggtaattttatcttaagccacaagcgtatatccacatgacgttagggaattggtctttcatttaccctgggaaggaatattcctgatctccacagcatgactatctgttgatttgttctttgtttgtaactaagtcatttttatcagaatagtacaaaatatagttttggttttgtttttttagagacactgtcctgctctgttgcctatgttggggaaaacagccccataacgcctagcggttaccccgagtccggcggagacaaaggagttagaaagagacagaataagcgtttaaaaggcgggtccaggggaccggagcgtcggaggcttgctcacggcccagagttctcaggctccgcccaatttattggtttacaagctctttgttcttagggcagatgggaggaggaggaagggatgagggaaaggattaatcagtgaaggagaactggagagtcattctgtaagatgtatagcagtggcggtttctgtgaatttccttgagcaaagaggagtgtcaaactacttaagatctttaactggccgggcgcggtggctcacgcctgtaatcccagcactttgggaggctgaggtgggtggatcgcttgaggtcaggagttcgagaccactctggccaacgtggtgaaaccccgtctctactaaaaatacaaaaaattagccgggcgtggtggcgggcgcctgtcgtcccagctactcgggaggctgaggcgggagaatggcgtgaacccgggaggcggagcttgcagtgagccgagatcgagccaccgcactccagcctgggcgacagagcgagactccgtctcaaacaaaaacaaaacaaaacaaatctttaacttatcgggactgaaacgggtgggagtgggtttcaggaggagccaagatgtttgattatactccactgcttcaagggagtgttatatgcctgagcaacctgtggaatgccgctgaggggttctgctctcgggcgtaaagacatgaaggcaataaggagacttttctcctcagaggccgcgcatggcttcccatgggtgtctcacacagggaagactaactcagctggcaccccagaaactctctttcccacagcctaggctggagtgcaatagtgtaatcacagctcactgcagtctggaactcctgggttcaagcgatcctcccacctcagcctcccaagtatctgggacgtgtcaccacgctcagctaatttctacctttttttttttttttttttttttttttttgagactaaatctcactctgtcaccaggctggagtgctgtggtgcgatctcggctcactgcaacctccgcctctgggttcaagcgattctcctgcctcagcctcccaagtagctgggattacaggcgtgtgccaccacacccggctaattttttgtatttttagtagagatggagtttcaccttgttagccaggacggtctcaatctcctgaccttgtgatctgcccgccttgggcctcccaaagtgctgggattacaggtgtgagccactgcacccggccacatttttttttttttaagagacaagttttcgctatgtcatccaggctacaacatagtttctatttttatttcaattgctttaggggtaccagcggtttttggttacaggggagaactgtatagtggtgaagtttgaaatcttagagcgcccatcacccgagtagtgtacattgtatgcaacatgcagttttttttatctgtcaccccccgcttaccctcctccttctgagtctccaatgtccattataccattctgtatgcctttgcatacccacagcttagtttccatttatttatttttatttaatttattttttttgagacagagtctcgctctgttgcccaggctggaatgcagtggcgtgaactcggctcactgcaagctccgactcctgggttcatgccattctcctgcctcagcctcccgagtagctgggactacaggtgccgccaccacgcccagctaattttttgtgtttttagtagagacgggtttcaccgtgttagtcaggatggtctcgatctcctgacctcgtgatccacccgcctcagcctcccaaagtgttgggattacaggagtgagccaccgtgtcccgccagcttccatttataagtgagaacatatggtatttggctttccattccttagttacttcacttagaataatgacctccagttccatccaaaagacattatttcactcttttttatggctgagtagtattccatggtgtgtgtgtgtgtgtgtgtgtgtgtgtgtgtgtgtgtgtgcatgcacacacatagcacattccctctattcactcatcagttgatgggcacttagattggttccatatctttgcaattgtgaactgtgctgcaataaactatgtatgcaggtgtctttttgatataataacttattttcctttgggtagatatccagtagtgaggttgctgaattgaatgtagatctctgtttagttatctgataaatcttcatacagttttccatagaggtccagtctacaatatagttttaaaggtaaatcacatttaggcttgtaatggaagagtcggctctatgcctttcccaagccaagcacttttagttctttttgttatttctcctgtctttatctctatgcttagatttcttgctatttccttttttttcttttttcttttcttttctccttcttcttcttttttttaaaagacaatttcttgctctgctgtccaggctggagtgcagtgagctgaggctcactgcaacctctgcctcccaggctcaagtgatcctcgtgcctcagccactcaagtagctgggattacaggtgcctgccaccatgctcagttaatttttgtatttttagtagagatggggttttaccatgttggccaggctggtcttgaactcctggcctcaagtgatctgcccacctcagcctcccaaagttctgggattacaggtgtgagtcactgtgcatttcttgatttttctttatgtagttgttatctgtggatttctgctatgaaattaaggcgttagtttttctaccaccctcccctcaatacacacatccagatacacaaacatacactccctccttccattttcagtaaagctcaattgctatttggaatcaatattcagtgcttttgttatgactatgtaaatattatgtttaaatttgtgctacctggagttagtaattactttgtttttatcatttgcttagttttctaggcatcactcattaattcaatcgcaaagcttccagtgtaactgaacatttactcaatatagccaaacatagctaataatcagttgatttcattttcctctggagacatcgctcctagagcacatcttctgatttcaggctgggttggttactttctttacccgggggtatagttgacatcccaggcctttctcatcgtcccttttctgtgcttaatctcatttattgaatgccatattgctctctttcttagtttaattctttgttttgctgaagcacatcctccagtagctttctaagaaagggtatatgcaaggtcaaatttctgagaccttgtatgattgaaatgtcattattctaccctcccaattaataatcattcagacctatacatttctatattagacatcattttgagggcatttattgtcttctagctaccagtattggtgtttagaagtgtgataccattcttgcttcagatccgatgtatgtgatgtttttatttggtggaagctcttaggattgtctttttatccctgctaatgtgaatttcattatatgccttgatgttagctgccctgtttcatgtattgggctgtgaattggtggaaagttatggtctagagaatcatgtccttcaattctgaagagtctcttgatttttaaaaatctttcccttctggtcgggcagggtggctcacacctgtaatcccagcactttgggaggctgaggcggtcacatcacctgaggtcaggagtttgagaccagcctggccgacatggtgaaaccctgtctctactaaaaatacaaaaattagctgggtgtggtggtgggtgcctgtaatctcagttacttgggaggctgaagcaggagaatcacttaaacccgggaggcggaggttgcagtgagccaagatggcgccattgcactccagcctgggcaacaagagcgaaactctgtctcaaaaaaaaaaaaaaaaaaaaatagaaagaaaggttttcctcctcagagcactccctcaataaaccatgtgtacaagtatccccatctcaggctctacttttagaaattatgacccattgatatagtctgaatatttgtccaaatctcaagttgaaatctcaaatcccaatgttggaggtagggcctgatgggaggtgtttgggtcatgggggtggatatttcatggcttggtgctgtccttgaaatagtgagtgagttctctcaagatctggttgtttaagtgtgtggcaactcccctaaccaccactctctcccttgctcttcaccctttgccttctgccatgattggaagtttcctgaggtctccccaaaagcagatgctggtaccctacttcctgtacagcctgcaaaactgcaagccaattaagcctcttttcttataaattacccagtctcaggtatttcttcatagcaacgcaagaatggcctaatacacccaccatctggtgcagtgcctggcacataggaagcacttaaataaatgattgttgaatacaaaataaactctgagaaaatcacagacagaactctcctatacatgcatacagagcacctggtgcatagtaaatctttaaggagctttagactctccgatccccccatgccctgcaatatggagtagcctcatcttggtggactcatcaggacatgctccccaggtctgtatgtccaggaatgcaattgtgtggatgcatccaggattgatcaggctcagggaattgccaatcttaaaccttaatgttcctttacaagcacaattggaacttaatgccaaaaaaaaaaaaattctgggatcttctgttataccctatcccattacggacaaatctactcgtaaaacccagctgctggataagcaagaacagccagaccaagggcgatcagtgcatggtcattagggctggtgaccctcgtctctgggcaaggcctgctggaggtggatatgcagcctgattcttgttctgtctcctcctctcctaggggctgtatggccactgtctcccattttgccacccctaccagttttccttcaaagtatgatatgtgggcaaagattaagttctcttaattatgacacatttccgctcttgcctctcaagtcactaaactgagatgtgctggacccctatggccaccacccatttacagatgatcagtgtaatctgatatactgataatccaagtgactaagcccttcattatatgttcattttccttaactccattctcagactgtaaccttaacctctaataagggggttactaggtcatagtcctcttaagttcatgtcctctacctcattactggaaccccagtatgcataacaccccctataaactgtagtgcttagaatacctgaacagccccctcctctctcacccccatttagcaggttatgcggaagcccagccccagaagcctcaggcagtcccctggcagagcccatctctgcaatctggaacttcaggcctgaaaaatcccctagaaggacccacagggaagacagctggggacagagatattgaatgacttcgccctggacctgcagctctgcaaactcacaggaagaagaaagcagacctcgctcccttggacagatgcccaagtagtaatggggttagaatgccttcctgacaactcagatccccaagggagggccctagggcagagaatcagcaaaggcaagaggatgagtcttagttctcagaaatccctgacttcccagctaagccccacctaggccaccagctgcttatgaggtcagagcagcagcagcagcagccccctccctaccccacggccccacgtggtaacaggtcacaatgccccgggtgcccactcccagaatgctgaccaaagtgggaggaggtgaggagggtttgctgggtgggtatgggggagggggagactctgcaggagcctaattccccactctgagctcacccttctgtctgcccgggccctaccccttcccctactctcacccttataatccttttcagcactaggtcttcccgtcacctccacctctctccatgacccggctctgcttacccagacccgaagcacgtgaggatccgatcccagttcctccaaggggcctgggtgctggggaggggtcaggtagtccagtgcgtccacctgtatccacctggggccctagctgggcccagctcctggacagtgtcctatggctgggggcactaggactgacaatccaggcagtcttttccaccactggcccagccctgctgctgcttctggtcagcttcctcacctttgacctgctccataggtaagtgggcagcagcctggcaggtgggcattgtaggcgggcgggccagtggacaacttccctaagcccagtcaccaccctctctctccacaggcccgcaggtcacactctgccacagcgcaaacttctcaccaggggccagagtcagggggccggtgaaggtcctggacagcaggaggctctactcctgcaaatgggtacagtctcaggacaacttagcctccaggacgcactgctgctgctgctcatggggctgggcccgctcctgagagcctgtggcatgcccttgaccctgcttggcctggctttctgcctccatccttgggcctgagagcccctccccacaactcagtgtccttcaaatatacaatgaccacccttcttcatcaggcccccttttctccttcctggctgggcaggtgggatgatacccctttcttcccagcctgaacctcacagtcctataatataggtatcagatacctggatctgagtctttgggcagcaagagaaggtaggatactagccagggagcccaaggaagaatgtggcagccacctcagagcctgtggattgggggcagccactctggcctcctctgtggctctagagaatgaaggtccagacagaaagacttgcgagagagcagtttggaaaggggtggatatcagccagcagggaaagcaggaaagggacagggatccagggagggcttcccatgagaaagcatgagaaactacatctgcggggctccgaggctcccctgccagcctggagggtccgtgcagagggacttgggtgggcctcacaccctacagtgactcctctcttggctggaccccaccccagcccgggtcacaaaggggctcctctggggagggtgggggtagatgagagtggggacttggatctgcctgccaggccgtcctgggcgctgcaggaagcaacatgacttaggtaactgcccagaggtaagtcccagtccctaattctgtagccccaccccacgcacactggtgccctcctgacccctgcaccccctctctgccccccccccccaaggtcccaggcatcttcaagaccctggccctctccccaggtgcaccagacatgatgcagcagccgcgagtggagacagataccatcggggctggcgaggggccacagcaggcagtgccctggtcagcctgggtcacgaggcatggctgggtgcgctggtgggtgagccacatgcccccgagctggatccagtggtggagcacctcgaactggcggcaaccgctgcagcgcctgctgtggggtctggaggggatactctacctgctgctggcactgatgttgtgccatgcactcttcaccactggctcccacctgctgagctccttgtggcctgtcgtggccgcggtgtggcgccacctgctaccggctctcctgctgctggtgctcagtgctctgcctgccctcctcttcacggcctccttcctgctgctcttctccacactgctgagccttgtgggcctcctcacctccatgactcacccaggcgacactcaggatttggatcaatagaagggcaaccccatcccactgcctgtgtctgttgagccctggcctagggcctgagaccccacggggagagggagggcaatgggatcagggctccctgccttggcagggcccagacccctagtccctaacaggtagactggcctgaccccggactccttcctcaagtcaatgctgcaggttcctggtgtgaggggctgggggctttgagaagagggggcaagacagatggcttagccattggtgaaaattgcttagccaggggcagagcttgaccaagccactgatagcgcccatatggatgtgatgatacccgtggggcccccttggcaactgacagcatctttttctcatagccactcagctgtctcagcttcagactcactgagaacttctacctgggtaccactggccttgccattcctcccaccaatcccctctttccacttccaggagaaccacagactctagagagggtcccagtgacaaaaatctatcagggagaaggctggccagaagccccaggagacctcaactcactcgctctccaaaccttgcagcccacgcatcctcctccctagacttcctacttcctgcctcagtctgcatccccaagtctgagaaatgggccaactggggtcagacagcacctactcactctctaagaatcccaaggtctgttatggaaaaatgatcaagaaatcccatttcacccacttacacaatgtgtggccttggccaattaattcatttgagcctcaatgttacgtgggccacttctgtcatggggttgttgtgagtcaaagacaatatctatttgtgaagcattttgtagaagccaaaaacctgtaagatgttgttttgagctctaagaactttctgtaggcgcataagatcttttgaccccaaagactgttgaaggaacaggaagcttctctgggctttcagatcaactctctgtcctggatagaattttggccctaaaatggtaaacaagaggtcggttaagtgtgtacaagatgtaaaaggtcatgtgccatgaaatctcaaaatgtgcagatgttgaactattttgattatgaaatgcttgggcctggggctgggtgccagatgcttgcacagctgtgtgagtggggacagcacagccccagggtttccaaaactgacccagcaagccgctcaggcaccagaagggctttggaaagggcaatcctttgatgccctgaatgctggccgttcgttcacttgctggcccctccaacaaaacattgagtgatcggtaattaccaagtaaggtacatgatagacaactttatccacacctgacccccacccaagccctggccatccccaactcctgcccagttctgatccctgctttatgtataaccctaaaatccttgctcttgaagccccagacccaaggtccccctcttttgtcccataaatactcagggccttggggctagcccctagaaccctggttcatttttgccttagacttttgcaaccctccatgccacggattagatgccttcagcatcagtgccaaaacccaaggtccagtccttcctttctgtttctttgtatttctcccgcattatggcatggtagtgagagcgaggtaggacatggggctgatgtggtctcatggttggatgggttttggtgcatgagctgaggctgggcgtgagtcccagcactctcacttactaactccatgcccttagtggaaatcgctaaaccttcctcaacttcactttcctcatgggtaaaactaaggcaagaacccctgtcttagggctctggcatgtgagtgaaggacctgggaccactcctagcaccacaaattatagctatgctgtgaccatcccattttagagatgagaagtcaggcccaggatagccagttgccagtggcaaggccaggccatctgagtcctaccaggctactcaagggaaggtgaagggggcaaaggaaacacaaacaacctaactaactgaagaccccaaggcttctcaagagctcctatcagagctaaagcccaggcctagggaagtcatgagtcaagccaatctagatggcaagctgaggattcaggatcccatgtggtgagggcagagaccaggctgcctggcctagatccatcattgacttggccatgcattgctagccagggacgttgctctggagccttgggtccattccaatgaagggagagaggagtttggggccctgaccagatgctctagtggatgggatgtgggcagcagcaaggagaagaccttcttcctttccccacagactatataccttttaccctcctgcccagctggtatggggtaaggaggtgcacccagactagagagctgatgggcaatactcatcaaattagatccacatataccctaggacccagaaccccagaatgaattttcacagaggtccataagggccttgcccctcaaaatgtagtcccagaatcagcaacacaggcatcacctggaagctggttggaaatacagtctcaggccctgctccagacaggccgaatcagagtctgcatttttttttttttttttttgagacagagtcttgctctgttgtccaggctggagtgcagtggtgcaatctcggctcactgcgctccacctcccaggtccaagcaattctcctgcctcagcctcctgagtagctgggattacaggcgcctgccaccgagtccgacaaacttttgtatttttagtagagacagggtttcaccatgttggccaggctggtcttgaatccctgacctcaggtgatctgcccaccatagcctcccaaagtgctgggattacaggcgtgagccaccgtgcctggccaagagcctgcattttaacaagattcccaggtgatacattgtaccctgtttgagaagtgaagcataagggggtattatgagaatgcctattgcactgttactagtgggagcaggataggtaaagggaagggtaaaacaaggcagatgggcccaaggggcagtaattagaaggggcagaaggtacatgaaccaatcttaaaatcttagcattgaaaaagaaatggaatgagaatacaattcctcttacacaaatttaaaagcatgtcagcaaaacaagacaatttttggcaagaacacataaaaacgaaagataaacagaatggaatggacaactctaggggcaggcaagtgggagtagggtatagagataacaggcaataaagctagagagcttgcagaggcgaaacgtgataccatcaacgtaattcctgaaattcctttaaaagtagaaaaagaagtccatttagagttaaaaggcttaaaaatgcaagtctggggagaatgggcatggtggaagcccttcggtttgggccaagaagggcgagccttcctatcggcctgtgtgtgacctgggctgctgggtggatgtgtttgccggccctcccccaccgcaccccgcaggctgctctcatgggattggactgtgggccggggatccagcaacaacttcggcctggccggaaaaataaagtcaaggagagcataaggaaccggagcggaggcggtgtcagcgagaggggccttgcgtctcaggagaggggggatctacagcggtgcacacatgtgctgggggatacctggggtagggcttccctccgcccctaggaacagggaaggcggcgtcagggggcgcaagctgctgaggggtaccccttcaagagatggagcgccagtggccactcaggaaaggagaggggtccccgaaaggaagaagccgtgcgacacccaggaacctccaagggccagctgcgggacatcgcgaggggggcgctgtcctttagactcgtgggtgcagagaaagggggaggctaggagaggccgagtggggctgggggtgggggagggacagccggccacaaggcatgagggaggagacagggtcgtcagggaggggaaggacgcctgtgcggcgcgcgctagaccaaggcccgggggcagggacaaggccatcgaagccgtggtcacagacgcgccgggagggagggggccacgtcgggcggcatgcgttgaggcgacaggagcgcctggtcagacagcagctgctctgaggcgggggaaggcgtggtggggggtcccctgcggtgggaaccctgcgaggacacccgggcccaggcgcgcggagcggggcgagggcggcagctggagggcgtcgaggccggagcgatgaccctcgggcagagggggacaggccagggtctgaggctgggagagaaatcccaagcccggcccggttgggaggccgtgggcatccacacggggcatgtgctggcggccctgaagcgccgatgtccccggactcgccgcacgcggactggggaccgacagcgcgcaaggagagccctctggctctggcaacgaaggggcgggcttggcgggggtgggaggagagagcgcggggaggggtgtcccacaggctaagactccagcactcggggaggggcgggagggtaagaagagggatcttagggccactgtcatcacagtggcagcttcgttgactctcaccccttgccccaaatcgccggcctgccgccacttcccctcactagagacccctaggcgtcgacggcagagttcctgagaaccctggagaaggaacggcctgatactgagctgggactccgactcctggaacagcctgagcctgatattatccgatgcccctgaggtaaagagctgtcatttgtgaggatctgacagggtctggatgcagccacctttggacaagttttttggtttgtttgtttttgttttttttctgctgagcattttcatctatattctggagctcatacttgcatcctttgtactgattctgttaccgaccctcaagggggtatttgatcccagtggggttttttccctgcttggtgccgttcatgccaatagactgagaccaggttcggttaagcagagcagaaactttatcattgatcaaggaatggagaaggggagcctgtgctcaaagcaccttcttggggcgggggggtgggggggtgggagtagggcgaagagggatttgtaagatgtcttagggcagtaggcagagcctgggggcggggattcctggaaagatagggctttccagggagaactggagtgtgtgcagtctctccttcactccagcactgcatgtgccccggcaaagtgcacctccacccccaatcccccaaccccccagggcggagatttcaatgtggtaatgaggtgaagattcaggtcagggtagcactgctgagctcccttctcatcttgtggcttgtttgtggttactggcttccagcctccattttttaaagcaagcacagctgtgaacactggttaatttcacaggttttggggcttgctgaaagacttggggttactctgcagtgacaattccctaccttgaaaatattttccatcttaaaagaacttgatttgctctccctctcccgtctccctctccctctcccgtctccctctccctctccctctcccgtctccctctcccgtctccctctcccgtctccctctccctctcccgtctccctctccctctcccgtctccctctccctctcccgtctccctctccctctcccgtctccctctccctctcccgtctccctctccctctcccgtctccctctccctctcccgtctccctctccctctcccgtctccctctccctctcccgtctccctctccctctcccgtctccctctccctctcccgtctccctctccctctcccgtctccctctccctctcccgtctccctctccctctcccgtctccctctccctctcccgtctccctctccctctcccgtctccctctccctctcccgtctccctctccctctcccgtctccctctccctctcccgtctccctctccctctcccgtctccctctccctctcccgtctccctctccctctccctctccctctccctctccctctccctctccctctccctctccctctccctctccctctccctctcccgtctccctccacggtctccctctgatgccgagccaaagctggacggtactgctgccatctcggctcactgcaacctccctgcctgattctcctgcctcagcctgccgagtgcctgcgattgcaggcgcgcgccgccacacctgactggttttcggtttttttttggtggagacggggtttcgctgtgttggccgggctgctctccagctcctaaccgcgagtgatctgccagcctcggcatcctgaggtgccgggattgcagacggagtctcgttcactcagtgctcagtggtgtccaggctggagtgcagtggcgtgatctccgctcgctacaacctccacctcccagccgcctgccttggcctcccaaagagccgagattgcagcctctgcccggccgccaccccgtctgggaagtgaggagcgtctctgcttggccacccatcgtctgggatatgaggagcccctctgcctggctgcccagtctggaaagtgaggagcgtctctgcccggccgccatcccatctaggaagcgaggagcgcctcttcccggctgccatcccatctaggaagtgaggagcgtctctgcccggccgcccatcgtctgagatgtggggagcacctctgccccaccgccctgtctgggatgtgaggagcgcctctgctgggccgcaaccctgtctgggaggtgaggagcgtctctgccccgccgctccgtctgagaagtgaggaaaccctctgcctggcaaccgccccgtctgagaagtgaggagcccctccgtccggcaaccaccccgtctgggaagtgaggagcgtctccgcccggcagccaccccgtccgggagggaggtggggggggtcagccccccgcccggccagccgccccgtccgggaggtgaggggctcctctgcccggccgcccctactgggaagtgaggagcccctctgcccggccagccgccccgtccgggagggaggtgggggggtcagccccccgcccggccggccgccccgtccgggaggtgaggggcgcctctgcccggccgcccctactgggaagtgaggacccctctgcccggccagtcgccccgtccaggagggaggtgggggggtcaaccccccgcccggccagccgcccagtccgggagggaggtggggggtcagccccccgcctggccagccgccccgtccgggaggtgaggggcgcctctgcccggccgcccctactgggaagtgaggagcccctctgcccggccagccgccccgcccaggagggaggtgggggggtcagccccccgcctggccagccgccccatccgggagggaggtgggggggtcagccccccgcccggccagccgcctcgtccgggaggggggagggggggtcagccccctgcccggccagccgccccgtccgggagggaggtggggggggtcagccccctgcctggccagccgccccgtccgggaggtgaggggcgcctctgcccggccgcccctactgggaagtgaggacccctctgcccggccagccgccccgtccgggagggaggtggggggggtcagcaccccgcccggccagccgccccgtccgggagggaggtggggggatcagccccctgcctggccagccgccccgtccgggaggtgaggggcgcctctgcccggccgcccctactgggaagtgaggaaacctctgcccggccagccgccccgtccgggagggaggtggggggggtcagcaccccgcccggccagccgccccgtccgggagggaggtggggggatcagccccctgcctggccagccgccccgtccgggaggtgaggggcgcctctgcccggccgcccctactgggaagtgaggacccctctgcccggccagccgccctgtccgggagggaggtggggggaacagccccccgcccggccagccgccctatccaggaggtgaggggcgcctctgcccggccgcccctactgggaagtgaggagcccctctgcctggccagccgccccgtccgggagggcggtgggggggtcagccccccgcccggccagccgccccatctgggaggtgaggggcacttctgccgggccgcccctactgggaagtgaggagcccctctgcccggccacgaccccgtctgggaggtgtgcccagcggctcattggggatgggccatgatgacaatggcggttttgtggaatagaaaggcgggaagggtggggaaaaaattgagaaatcggatggttgctgggtctgtgtggatagaagtagacatgggagacttttcattttgttctgtactaagaaaaattcttctgccttgggatcctgttgatctgtgaccttatccccaaccctgtgctctctgagacatgtgctgtgtccactcagggttagatggattaagggcggtgcaagatgtgctttgttgaacagatgcttgagggcagcatgctcgttgagagtcatcaccactccctaatcttaagtacccagggacacaaacgctgcggaaggccgcagggtcctctgcctaggaaaaccagagacctttgttcacttgtttatctgctgaccttccctccactattgtcctatgaccctgccaaatccccctctgcgagaaacacccaagaatgatcaataaaaataaaaaaaaaaaaaaaaaaaaaaagaacttgatttaacatctgttggttctgtcatattttccaggttgcgtcttcaaatgtcttgcccccaaaataccagtttttaaaattaatacgtgatattgtatccttgcaaaatatttgtaacatgtatgaaagttatgaacctctctaaaccaagagaccacatcaatctaaaagacagatgttatcaggttagggcctcttcctgtgtgctcctcatcttactgtgcaagctgggattcctggacaatggcaaattgaactgctcttcacagatatctttgacttgatattgatttaaaatgaactgcttgcttctaagtttccaccattaagaattatgtacattgttgtagatttctggtagttaacttttattcagttaaagaaattcctttcaagacctagtttactaacaattttggtcaagaatggatgttgaattataaaattgctttttctatgtctattatgagaactattctactgtattctgtttattcagtgaattacattcttgtttcttttattaaactggttttatggttgttttgttttgtttgagatggagtctctctctgtcgcccaggctggagtgcagtggcatgatctcaggtcactgcaacctctgcctcctgaattcaagcgattctccagcctcagtctcccaagtagctgggactacaggcacccatcaccatgcccagctaactttttgtatttttttcttgttgttattgtagaaacagagttttgccatgttgcccaggctggtctcaaacccctggactcaagcaatccacctgccttggcttcccaaagtgcttgggttacaagtgtgagccatggtggctggccagtttgttctttttctttttttattagtgtgtacaattccatcgtacgaaaatacaataatttatccgttctcttgttgatgaacatttggattgtttccaggttttggctatcaataaaacatctacgaatatttttaagtctttcagtggacagagtcactcatttcttttgcaccagaattgttgggtcataaagtatgcaaatgttcaactttagtaaatgttgcccaatcatctccaaagttgttatatcaatttatatcaatttccactgcttttttgcaacctgtccacctaatttgtttggagtttctgctctccaaggtctcatcagacatgatatttgcatttctatttctcattttcacttgcttgggtgatttcttacaggaagaggaaatactatatcatcttcaaactgcacaacctctttccttttaaaaaccaggaatgcaagtttggtttaacatccaaaaaacaactaatgtaatccaccaaattataaaaaaaaaaaacccaaatgatcatttcaataaatgcagaaaaggcatttgacaaaatacaacatctattcccaataaaagctctcagcaaactaggaataaaaggaaatattctcaacttgacagaaggcatccatgaaaaatctgcagctagtatcatggtagtagtatcagctacttcactgtggaaaaactgaatactttccacctaagatcagaaacaagaatgtccactctcactacttctattcaatgttgtactaaatgtcctagccactgcaatagcacaagaaatataaataaaaggcatacagattggaaagcagtaagtaaaactgtctttattggtagacaaaagaatcatatatgtagaacattcaaagaaacctataaaaaagttatcaaaacgaagtgaatttaacaaggtagttaacatgtgtacacagtcatgattgtgatataaggtcaatatacaaaaatcaattgtatttctctgtacttgcaatgaacaatcagaatagaaaaaattttaaaatgactacttccaagaatagaaaaatatgaagcacttaggggtaaatctgacaaaatatgtgaaagacctgtacactgaaaactacaaagtactgctgagaaaaattaaagacctaaataagtcgagagatatactttgtgcatggggtcagatataggtcagacatattgttaagatgtcaatttcccccaatttatctatatattcaatacaatcgcaatcaaaatcccagcagcatttttataggaataacaagctgattttaaaactcatatggaaatgtaaaggacctagaatagccaaaataactttgataaagaacaaagttgaggccgggcacggtggctcacgcctataatcctagcactttaggaggctgaggcgggcacatcaccttggaggaggtcaggagtccaagatcagcctggccaacatggtgaaaccctgtctctactaaaaatacaaaaattagccaggtgtagtggcgtgtgcctgtaattccaactactcaggaggctgaggcaggagaatcgcttgagcccaggaggcggaggttgcagtgagccgagatcgcaccattgcactctagcctgggagacaagagcgaaactctgtctcaaaaaaaaaaaaagaaccaagttgaaggactaacacttcccaatgtcaagatttcatcaaggtacaatcaaaagagtgtggtattggtataaggacagacaaatagaccagtggaacacagtagagtccagaattagatccacacatatatgaacaagtgagtctcaatgcaagtgcaaatgtaatttagcggagaaagaatagtcttcaaccaatggtgctgaaccattgtatattcacataaaaatgaatttcaatttatacttcacaccataaacaaaaaattaactcaaatttgatcatagacctaaatgtaaaaccaaaaactataacccttctaagagaaaacatagaaaacaaatagttgtaaccttgcattaggaaaatatttcttagatatgacaccaaaagcacaatccataaaagaaaaacttgattaactgtactttatcaaaattaaaaacttctgttcttgaaaagacactgttaagaaaaaaagaagacaagccacagattggaagaaagtattttcagatcatatctgataaaatacttgtatccagaataaagaactctcaaagtccaatatgtaaaaagggggatagagggaaagagagagaaaaatgtgaaaacctacttaacagaagaagatatataggtgaaaaataagcatatgaaaaggtgttcaacataattggttattagaaaaatgtgaactaaaaccataatggagataccactacccatctattggaatggctaatattaaaaagactgatcataccaagtactggcaaggatgtggaggaattgcaactctcattgttggtgggaatgtaaaattgtacaactacttttgaaaaattgtttggcagtttcttaaaatgttaaacatacacctaccatataatctagccatttcattcttaggtaaaaatgaaaacatatatccatacaaagacttgtatataaatgttcatagcagctttacttataatagtcagaagctgaagataactcaaatgtccatcaataggtgaatggagaaatgttgatatatcattacaactgaatactagtcagctataaaaaggaataaattgttgatacaacatggatgaatttccagttgttccattaatcccattcattaggatgagtgaaagacgccagatgaaaaaaagagtatccataagcaggagttgaacaatgagaacacatggacaccaggaggcaaacaacacacaccagggccagtcaggaggtgggtggcgaggggaaggagagcattaggacaaatagctaatgcgtgcggggctcaacacctagatgaccagttgataggtatagcaaaccaccgtggtgcacgtatacctaggtaacaagcctgtatgttctgcacttgtatcctggaacttaaagtaaaataataataataataataataaagaaagaaaaaagtatctattgaaagattccatccatataaaattctagaaaatacaaactgatctatagtaacagaaagcagtaagtacccatgattgcttggggacaggagcagggggatatgaggaagctatggggaggaatgagagggaggaattataaagaggtagaagaataaatttcattatcttaattgtgatgatttcatagatgtatatatatatctacttgtatgtgaagtctattacatgtcaatcccacttcagtaaaaaaggtttttgttttgttttttagagacagggtctcattttgtcacccaggctggagtgcagtggtggaatcatgggtcaccacagcctcaaacttctgggctcaagtggtcctcctaagtgatcctcctgtttcagcctcccatgtagctgggactataggcatccaccactacatctagagaattttttattttttgtagagtcgaaggtggggagaggtgtcactttgttgcccagactggtctcaaacttctgccttcaagtgatccgcccacttcagccttccaaagcgctgagtttacaggtgtcagccaccacatctggctgagcaggttttgctttgttttgttttgttttgttttttgagaggagtctcgctctgtcacccaggctggagtgcagtggtgcaatcttggttcactgcaagctccgcctcctgggttcaccccattctcctgcctcagcctcccgagtagctgggactattacaggtgcccaccaccacgcctggctaattttttgtattttttactagagacagggtttcactgcgttagccaggatggtctcaatctcctgaccccatgatccgcctgcctcagcctcccaaagtgctgggattacaggtgtgagccaccatgcctggcccaagcaggttttttttttttttaaagaataggctcatttccttgcaatcagagtttatctttcactgatgtacctgtttagatatacttcaatactgtactgaacacagaacctaggcagggaactgggtaatgcaacagaaggcaagttatctacttttgctgggaaacttccgatattattattattaatattattattattattattttgagatggagtttcactcttgtcgtccagactggagtgcaggggcgtgatcttggctcactgcagcctccatcatccgggctcaagtgattctcctgcctcagcctcccaagtagctgggattacaggtgtgtgccaccacacccggataatttttgtatttttagtagagacagggtttcatcatgttggccaggatggtctcaaactcctgacctcaagtgatccacctgcctcaggctcccaaagtgctgggattacaggtgtgagccactgcgcctggccaagttttacttttttttttttttgagatggaatcttgctctgttgcccaggctggggtgcagtggcacgatcttggctcactgcaacctctgtctcccagattcaagcagttctcctgcctcagcctcctgagtagctaggattacagacatgcgccaccacgcctggctaattttttttgttgttcttggggtttttttttttcttttgagacggagttttgctcttgttgtccaggctggagtgcagtgcagtggcgtggtctcagctcactgcaacctctgcctccctggctcatgtgattttcctacctcagccttccaagtagctgggattacaggcatgaaccaccatgcctggcttttttttttttttttttttttttctgagacagagtttcgctcttgttgcccagactggagtgtagcgccatgatattggctcactgcaacctctgcctcccggctcaagcgattcttctacctcagcctcccgagtagcttggcattacaggtatgcgccatcacatctggctaatttttgtatctttagtagagacggggtttcaccatgttggttgggctggtcgcaaactcctgacctcaagtgatctgcccgccttggcctacaggggtgagccactgcgcctggctgaagttttacttttcttaaagagaattttttttttcctggaaaataagtgctgacatcacaactgaagtgctcatgcatcttttactcctttcaggaataccttggtatggcaaatgaatggacacagagtccattctttaaaaccaattccatgaatgagaggaagtcaatgtaagattgtcttcttaaatgatctgtcaatggtcaaatgtgaatggtttttgagacaatgaagtttgagttctctcttgcttaactagcaaatagtgggcctacataccagggcaacttaagatttccattattttcacatctcaaaaaaaaaaaaaggaaaaaaaagggaaacgatttaaatgtaagtgatgactcatataagtgatgactcatataaggctatttgtaagtttcttgcttcccagtcgggactgaataaaatctacaacagatgagtcaaatttttaagctttttgtaccatatgcttatatgacaacaaactgagaaacatttacctcctttattctattcttttttttttttgagacggagtctcacttctgttgcccaggctggagtgcagcagtgcgatcttggctcactgcaagctccgcctcccgggttcacgccattctcctgccttagcctcctgaatagctgggactacaggcgcccgccaccacacctggctaattttttgtatttttagtagagacggggtttcacgtgttagccaggatggtctcgaactcctgacctcatgatctgcctgcctcggcctcccaaagtgctgggattacaggcatgagccaccacgcccggcccctttattctattcttatgataaatttcaagtttaaagagattaagctatttccataaattttaaaggaatgtaagaaagttttaaggacaaaggtgttgggacattgcagtaaaggttatgaaacctcaccgtgggccatgccagccacatagaaaaatgggttggaaattaaaaatatggaggtagggccaagcatggtggctcacacctataatcctagcactttgggaggctgaggcaggcagatcacttaagcccaggagttcgtgacaagcctgggcaacattgtgacaccccatctctaccaatcaatcattcaatcaataagctaggcatggtggtgtgtgcctgtagtcccaactatttgggaagctgaggttgggaggatcacttaatcctgggaggcggaagttgcagtgagctgtgatggcaccactgcattccagcctggacaacagataccttgtctctctatgcgtatgtgtgtgtatatatatgtatttttatacattatatttatataaacataatgtatttctataataaatatatatatttataaattatattcatatgtatatatttttatatatacatatagtatacataatatatatatgtatatatataaatacatatgtatggcagtagaatgaaggggatattgagcacatttgaggagtctccaggtttcttagtgtgaaagctccagaactgggatgggatttgaagcaagtgaaaaaggcttggcttggctcagtagggaaggtgacaggattcctggagaacaggatggaaaacaacagagatctcactgaggctgcgtcactcaaattactttttcctgcaaatcaatccaggtgtacagttttctccagcaatatcaggaagccccagaatcagaggcacaaaggtgtctgaagagagaaaagtgttttgagaaggaaaggcagagtgacaaggggttgggcaaactggatacagctgaagacggctgccccaaggatgggtttttgttaaagaaaagaaaaaaatcaatttgggggctgagcacagtggctcacatgtgttgtcccagcactttgggaagtcaaggtgggaggattgcttgaggttaggagttcaaggccagtctgggcaacatataaagaccttgtttttatattttaaaaaaaagtgaaaaaataaatttaaaaaatcaaatgttgcaaataatgattaaaaatcttatctcacaagaagctttccttcatttttgtatgtcccttctcctttttgtttataccagagaaagctgaacttaaaagtttcagaactgtgctgacgcttttgtacactgtctcatttggttcctctaaagggttttattaagtcacattgtctgtgtcagtttccagcaccagtgtattgattcattagcttcccttcatttgcatttagtctagtagatggctagcaaggatcaacacttttctggtctgctatttccatctccttttgtgtgagatgttatgtccttcaacaaggtaaaatttcattaataagtatggaaagttaatacaagaattctgcatccttctcttctatccattctaattcaaaattatttacggggtcttcatgttaccttatatttctgccctcacatcacttatcagtccactgccatgctccatccctcacaccaccccacattttagttcacactccactactgacgttctttgtacagtcatgaacctaggatcaagactacctgttaaagctgaaatcctatacctccctgctttcaacttctgcatggagcttaaaacagtgtctctaccaccacccctatcctggcacccaccttggattttgtctccctcagctccttttttgtctcaccaccagcaccaaagcggttggtctgtgttctctttccttccactgcacatctcatcaatcaagttagaagtttcgaatagaggccgggcgcagtggctcacccctgtaatcccagcgctttgggaggctgaggtgggcgcatcacgaggtcaagagatctacctcatcctggccaacatggtgaaatctcttctctactaaaaatacaaaaactagctaggtgtggtggtgtgcgcctgtagtcacagctacttgggaggctgaggcaggagaattgcttgaacccgggagacagaggttgcagtgagtgaactccagcctgagtgagactccatctcaaaaataaaaaaaagaagaagtttcgaatacgtctcccacttgggtttgggagcttctagtttcattccaaccacttactgtgtgtccactatgtgccaagaattatgcaagataagtttatgcatcttcgtatctttggaggtagatgaataacgaatatacacatgaatgcatgagaccgggaggtataggtaagaactagccagacccaaaattccagacaaaatattaacaatttccacttagcccttgatttttccccaaggtgctgacaataggggacccctccaggatctctgttaaatacacatgttctggtgagggtagaattaagtatgagacaggagggcacattcaatgatttctaaatagtgtggggtcaaaggccccacgttggacaaagcccagaggcaacctcccccaatcttaagatcatggtttgggatacccactgcacacaggaatttgtcactctgttcttccatgcctttattggtgacagcaatggacaagaacaataccaggcatagcagacaccctagcccagtacctgaggtgccaggcaggccctgaagggccattggcacatccagtcccagcccaagatccagtctacccaggccatgtccccgaatgggcaggaggccgtctgtccagtttgtatgtgtggatcagtctctctgagtgtctgagccgctgcctgcagggcccccccattctccgcacatggtaggggctgttaggaacatagcgtggcatcccccggtggaccactgggccccagtgctgaccatggggattagggccagggattggaggtggcagagggccaggcacaaagttcactccagggccacatcctacaaaagaaccagtcattataagagcaggcttctggccagagtgagtgcagctctgccttgaagcaactcttgtcctccaggtgagcttctctgtttccctatctacaaaaaagggatagtccttcccctaccttcagacggtgaaacagtgacaaccagtgagctgattaatgaacctacagatgatgtttcagactcagggactgctgtgaccaaacccagtgctaggggcacaaggagctacccaactcctctcagctcacctaggcataggaggctgggtaaggggaggtacaagagggtgggggagctgcagaagcacctacctaagtggggtggcatcgagaagtcctccactggattatagttgaagaattcatggggtgggaagggctggcctgggaaaaaaggggtatcctggggcaggggtgggaagaggggaggtggcgagggctgaggaagcgggtagggaaaaggcatgggaggaggcaaagaagaaggtgggggtgggagcaaggccaggtgctccccgaagtctggggtctgcctatggcttccctggaatggatgattcatctctgcccagtcctcaatccacgggtctaggaatgggatggttgttttaggtaggcttgggagccaggctgccctgaactctggccatccacacttctaaagctctattccttcctcttggagagcagagccaccaggctggagcatccttgccctctacccagttttcctcattccctctcatttcaggccaagcccaaagtgtgttccttctctcttacctctcagacttacctttgttctaacctacacttccctccagagccttctttgtttgcccaggtcttgtatctagctttttcctcgcccacctcctccccatagaccagtaaataagccaaacataaagatcctgttattcccttccccaacaacttccttttaccatccaaacttccaaaaggaatgttttgcccaatttccacttcctcctcaattgctcactccctcctttaatccaaacccatgccctcaacacttttcctactaaatgtaaccacttgctaacaaattcccttcttctcaacagtcatgtgacactgccagcagcctcagtccttcctaaaagtgcccctgccctcatctccttttgtttccgccatagcccctctttcctgccaatccaaagcatgagcatcgttctgtctccctcacagctgccactgtgccctcagttttaatctctctgctgggtaccaatgactgcaaatctactctgtatttccaaagaacctcaaatcaatctgctgtgaccaaactcaccaactcatccttccaccccaaatcaactctcccttttcatggccctaacttctgtagctccaaattggatttcaaaggcctaagccatcaaaactagccttacaaccttcagggcatcccatcatttgctggggatcaattattacatctaaacaagaaaatggggatgtttaaccaaaatctgtattcacctccctgatgctccaactcctggctaccaagtgttacaggtctgtctctatgatattcctggactctctgtgcccccacatcctcttgtgctgccataatcggccttctaacatgactcgtgcctcccattcaacaaatacaattctgttgatactgtgtacagggaaattgtgctagacactggggctgaaaggggtgagtcgtcaacaagtgcagcaggaaacttgccctttaaggacacgatgcaggggagaagcagccatggagacaatcagccatggtgccctctttgtgtgcatgcagggactagggtgttgacatggaaacagaggttctgcagcagagtgttacagttgagatgtgatggggagcagtgcctcaaaacaagggggagtggggccctcagaagcctccaccaaaggcccagagatggggcccgaggagagctacaccaagctgcaccagtcacagtgggactctgaggctgaactaagaagcctatggaacactgtccattgagcccaagtccataaggctggccttcccgatgcaacatccctgttccacaccctgccagttgactgtacccccaccccccagctgtgggcttctttgcttctgccacactgcctggatggcccttcctccctgtctttccactcctcacacccatgccccatttctttcctgttaatctgttgggtaggacccttgcaacatgctgccttatgtggtcaatacttgtacaagctccttcaagcacacagaaatgactacacagccagactgtagaaaactggaacttggacaagaatattgctccgatgatctaaccctcctcaggggttgaggaaggtgcatgcagaagccacaggagtccttcaagggacctctacttcccttgagtggctgtgtcccattctgtttctgagccctgtcctctgagggccccagtgcatcactacccccccacttatggtagggctcaccagggggatagccacgcttgggcagctccacgccccaggcgtcagccacatgggtcagaagcaggtgtgagaggtggcggtgtgcatgctggtcccagtggacaccatcccgatgacggtgctgtactgcatgccggaagtgaaagtggaggtctaggacatcaaagcagtggtccccggccagcgtagcactgtagaagttcccttcaaccacatcccgccgcagggagcctgccaggggctggagctaagtgagaaagtgcagcctctaagagccacagaacgcagcagggtctgaaagcagggtgtcctatctaccagtctgctatcccatctcttgtcctgatgggcctcagtcacttgcctctggcaggaggaaacccccagtgatacgttccccgaggggcatcgccatgttccacaccagcaggcaggagtctggcaatacttggtccatgcgcacaaacacccgctccaggttctcccggtagctctccattgagcagcgaccatatctgttggataacacacagggtgggcaagagcacaagggtggactgcctcagccgtacttccagccccaaccagtattcccctttccctcgccccaacctggagagatcccagaggcaggagttgatgatcaccaggtccggggcaggtccatatgtcagctcttccagaacatcctcaaggtactcggagtaaacacgagtgaggaagtagaagcgcacaaggtggtggccagagcccgagcagaactggcggacctcacgatactgtgtcccgttgtgcagctcgcccagctggcccccagccaccagctggtcctgttcaaagctcagctccccctacccaccccccccaccctactggtcagacccatgccagggaggagaaccctgccaggccagggtctgtgcccacccaccactgacatggccaccaagcttccctcaccttggctttcagctgggcagctgtgagcagtgagtctttctggagcaagagcaccaggtccttgtacacagccctctgaactgggaggagacagagatcccaaggctgaggcagacctcagcctgccccagctccttccaagtccaggaccccattttcccagggctgaggtgcccgacaccagctctgtggttgacttagacgcaggagaaaagatgaggttaaaaagtcctggcattgcctctgttctgtgtgcctcctggccagcagtatacagtgacccaagatcacctggcagaaattaagtcggccaagtcacccaggagacacactacacaatgcaacgctttcgtgatggaaattatggggagctgtcagggcgagaaatgctgagcaaggatgggctaaaaagtgcacaggttattacacctgtcaggactcctgtggaagatgtgtgggacataaaaagagaaaacctactggacggaacagaccagaagacagacaagagatgtgagatggaaacaaatggtccagacacactgaacgggctgcaaggtgtgggactggaagcgtcaccctagaagaggcactcactggagtcccccaagatgaccacgaacttgttgtgtagcagctgctggacttccgaggcctggaagtggaccatgtcgcttcgcagcgggcggcgcggctcctcgctcgacagacagaagaccatgccgccaccagcaacgacaggctgcagggagaggccactaagcagcgcgatggtggggactctgggcaggtcagcctcagggctagcccctccggggctgctcaatgctaaagggaggaggtgacggcagcagagccatggtggcgccagccttggtcacacttggtaccagaggcagggggtcgtccagccagcaggcctccagggcactggggagcttcccgcgcggcgccgccctgcgcctcgccacgtgcccgccgccgtcccgcgcatgcgcgcacccgctcgcgccaattaccaagtcccggggctccgcggtgttcacccgcgacccgggtatgcctgcgcaccgcgcgcctggcccgcagcgggctcctagccaagcctcatgttcccgcgccccagtcggccagtcggttctgcaaagctcccgccccgcagagaccgtgggtccaggttagccgtcggtgcacagcccagcgcccagcgctctccatgcgagcgtcgctgtggccccgacggcgcctcaggcctcggcgcctcgggctgcgacgctcacagcttccacttccgttcacccatgtcccgccctgagcgacccccagtgcccgaagggaaagcaaggcgatggaggtggccgccacagggcgcaggagccagggctgggcccacttggcgggcgcgaagcccaggtacgggctggggtctcggggcggcagccaagtgaggctgcccacagtggtgatggccgcggcggcggcctcgccacgtgacccggacgggcggaagcggaagtgccggcctggagcccgctctaggtgggtgtcccctcggtgcttcccagctgccgtctgcaccagccatggactgctacacggcgaactggaacccactcggggactctgccttttaccggtgagctgccccgccctcccgcccacggcctggcttaccctgctcgcccgccggctggagtctcccggcggcgttcgcccctgtcactactggcgctggggtccgccccgcgccggctctccccgagcgtctgccacttagcgcacagccgcctttgggcagggagccgggccttcccctgctccagaaaaggaaactgaggcaagcacagtggtcaccccgaagcccaggtctgttagcctccggaaagatgctcagatctcgctgagggaggcagctcgcgggtgacagcgagtgcccagtctcctgccggaaagtgctgctgaagtcagaccacaggggcgctccgaggggggcgggatcgcacggcgggcggggtaacagtgctgaccaaggctgggaaaagggggcgagtcgtccgtgaatcccggaacagcggaagtgggaacccctgggttagggcagcccgcccatgggagttgtagagtcctaaaccacggatttttctaaagtgtaaacccgttacatcgttacccagattaggattttcccatagcttccctaataggaaaaactacgaacttctcgtggaacgtctatctgtaaggcagcccgtttgtctctccaacctcatctaccgctctcctacccaaatcttgcgttccagctgcgcagaattacaaggccctaaccagtctgcagtttctgtggatactgccatttctctctttatctcactgaagaattttgcgcatccttcaggacttagtagttcaagggttctttctggaactgtgcctgattctcccccaatagaatcctgtgggcctcactgggcccagtgctagggtcttttaggtatggtctatttgtatatttaggcgacatttgtataggtttcttctgctaaaccaggctccttcagggctgaaagcattttttttttttttgacagagtcttcctctgttgcccaggctggagtgcaggggcactcggctcactgcaacctccgcctcccgggttcaagggattctcctgcctcagcctcccgagtggctgagactgcaggcccctgtcaccacgcccggctaatttttgtattttttgctagaggtgaggtttcaccatggtggccaggctggtcttgaacttctgaccttaagcaatctatccaccttggcctcccaaagtactgggattacaggcgtgaaccactgagcccggccaaaagcatgtttcttgcttctctttatcaccagtgcatatttagaacagtgcttgctatgtaataattgcccattaaagttttttaaaaatattttactgggccgagctttgtggcatgttcctatagtcccaggtactggagaggctgagttaggaggatcactggagcccagaagtttgagggtgtagggaccgatgttagaacctgtgaataaccactgcactccagcctgggcaacatagcatactccctctgaaaaattaaaaatattattttaggccaggcgcagtggctcatgcctgtaatcccagcactttgggaggccaaggtgggtgaatcacctgaggccaggagtttgagaccagcctaaccaacatggtcaaaccctgtctctacaaaaattagccaggcataatggcaggtgcttgtaatcccagctacttgggaggctgaggcaggagaatcgcttgaacctgggaggcggaggttgcagtgagccaagatagcgtcattgcattctagtccaggcaacagagtgagactccgtctatatatagatatatctatctatatctatctatagatagatagatatagatagatatatagatgtatctatatatatatagatacatctagatgtatctatatatagatagacatatggatgtatctatctatagatacatatagatgtatctatctatagatagacatatagatgtatctatctatagatagacatatagatgtatctatctatagatagacatatagatgtatctatcgatagatagatgtatctatcgatagatagatagatgtatctatcgatagatagatagatatatgttatggattgcaagtaaagatcacaaagacattgcatgggggtcttacttaaatagaagacatttgtttgtgctaatgaaactgtataccattctcactgacatattaaaacttttaaatgtaatttttggtacctaatgtgatatacttcctagatggacaagtgccctgtggcagtttttagagacctgttgcatttgttgtttatttataattctctcttagaaatatgcctgtgcaattggccgagcgtggtggctcacgcctgtaatcccagcactttgggaggctgaggcaggcagatcacgaggtcaagagttcgagatcagcctggccaacatgatgaaaccccgtctctactagaaatacaaaaatttgccgggcgtggtggcacacacctataatcccagctactcgggaagctgaggcaggagaattgcttgaacctgggaggcggaggttgcggtgagccaagatcgcaccactgtactccagcctgggcaacagagcaagactccatcttggggaaaaaaaaaaaagaaaagaaatatgcctgtgcagtatgaaaaaattgcaaaaacttcattaaaaatccataaatgcagtaggaaatgatttcaacttgtttctgtggagaaggaatttcagctgaccaaggtagccatgtcatttagtatttacacaccagctagttgatacaacattcacttttaaaatatcaactttacttgtattattttgaagatacctgttgcctacccaggcttattaaatcaaagagtactgcagacattgacctcattaccacagagctcttatttgtcagatgtagtctttgctttgttgacatgttaataaggttttaaaagaatgtatgtgttgggtgcatgccacagacacaatctgaatgattaatctactcttacctgtgctgtactgccagaaaggattaggggtctaaggcttgctggggaggatatttatgttttaagttgctaacagctattgagcctttcttatgtactaaacatgctaagtactttatgtgttttaacttgcttaagccttacaatcccatgaggtaggtaccatcttactgatgaggaagccgaggcacagagaggccaggttatacaactagtgaccaggttacacagctattgagtagtggagtcaggctttgaacccaaacaggttctagacctctgttaaaaaatagggttttgggggcgggcaggttaacaggaaaatataagagcatgtttcaccttttccaccagaatggaaatgctttaagagcaagtacttagttttgttcatatgtgtgcatagctttatgcataggcaggacttgatacatgtctgagtcagtgaatgaatgataaaacaggtggcagacattacatttcaagtcctatctgcctgacaggattcttttgtattgggagtagtattctggagaacccactcaatttgggaaggcaaggaggagaaacggtgaccagttcttatgggactccagaagttaagctatttttttaatcctaaaaatgcaacttgggctaatctaattaattaatttgtcccatccctttggcaggctgagccagtatgataaaacagatgtggaagagttctgcctgccatcatagagcttacagccagcaggcgagacagttgataatcactcagtatttgtttgatcataatcactataaagagaggtatagtagcaaataacctaagagaacatgttacagactccaggagtcaaaggtagagaagacactctgaaagaagtaataataccctatccaggggatgagtagatgtaggtgcatgaagtgggatggaggtggagaagagcatatacacaaaagtcttgaggcaggaaggactgaggcatgcacagtgacctaaagagagccagtgtggctggagtgctgtaggcaacaagaacaggacatggatgaagttgatgcccttcgtgtaggggtcacacgctgcagggacgtgtagatcaccgttatctgaagaacgatgggaagcctcaattaaaggatcttaacaaaaggttgatgtaattggatttgcaaggggtgtgtgtgtgtgtgtgtgtgtgtgtgtgtgtgtgttttaagttccttttgtaggcaatgctggggaaaagttggaaggaacaagcaaaatggaagcaagggagatggttaggagcctgatggaacagaacaggaaaaagttgaggatggccagtactggggtggtgatggtggaggtggagagaaggggccagtctcagagatttagaagtaaagtggaagaaattcgtaatgactgcacttggtggggaggaaggagagcaaggaatcaaggatgacttggatttggggcttaaataaaatcatgagaaaggaagcgtgagtttggcagggaaggaggtgagcttggttctagatacattgagtttcaggtactaagaagcatcttatggtaaaagaaaggagagttaagatacattatatactcctgaaattatttttagaagggagggcaactatttaagtagttatatttttgtttcattttgtttttttgatacataaacatgaacttttttttcaaaaaagtcagctgtgtgtagtggcacgcacatgtaatcccagcaacttgggaggctgaaaaaaaaaaagaacattttaaaaaattgtggttaaatatacatgatataaaatttactctcttaaccatttttgagtgtaccctttaatagtgttaagtatattcacgttgttgtgcaaccagtctccaggactttttcatcttgcaaaactgaaattctgtaccctcaaacaactccccatttcctcctccccccagcccatggcaaccaccattctgttttctgtctcagaatttgactaccctagactccttatgtaagtggagtcatatagcacttacttcctgtgactggcttatttcacttagcataatatcttcaagatttatccatgttatagcatgtgtcagaattttcttccttttcgaggctgaataatatgccattgtatgcatctaccacattttgcttatccatttcatctttccatggacacttgggttgctggtagcccttggctattgtgaataatctgctgtgaatgtgggtctacaaatatctattcaatattttctgtactccgcttttttttttttttttttttttgagatggagtctcgctctgtcgcccaggctggagtgcagtggcgcgatctcagctcactgcaacatctgcctcccgggttcaagtgattctcctgcctcagcctcctaagtagctgggattacaggcacccaccactgtgcctggctaatttttgtatttttagtagaaatggggtttcaccatgttggccaggctgctttcgaactcctgacctcaggtgatctgcctgcctcggcctcccaaagtgctgggattacaggcataagccattgcacccggcctctgtactccgcttttaattattttgggtatatatccagaagtggaattgctagatcatatggtaattctatgtttacttttttccatagcagctgatgtaccattttacattcccagcaacaatgcccaggagttctttagtagtatatgtttttgagacaggctggaaacaagggatttcaggagtgacagtgaactctctttagggcctgggatttgggaattactggattataccccaaggcaaccagattatacctaacatgcatcttcctccctagtggtctgatatcttagcttggacaggctggagatcatctattttcactcaagggtcttctcacaccccagtagaccatgcttctccagcagttcagctgccctgccacagaaatttcttcactgtttccagcaggggactgcaattgaggctaccggtacctcactacatccttaggtttaacgatttcctggtattcgattcgattccaaggtccatttactgctgctgagatttccacttctgggacgtaggagtggagcagaaagatggggctggccttcctcactaagtgtgtggcctctcttcacagagtcctcacccttaggcttttctgagaagctgctcttcactctgcccatccataccctgtgctaccctccaggcacagtttgagtcacctcactgtcctctagaagcccactttacctctaaggcttcaggaggtggtccatacgttattgctcttcactccctgacctttacttttgtacccctttagggggtccattgtgtctccttcccacctggtctttgtcgctgcagacatccttgaccaactgcactgctccctgattgttgttttagcccacggcctcctaggcatcccagctcttgccaccttctagggagacttaagtggccacctggcttcatggttctatgacctctactcaagtgattttatccatctcacccaccccctccctggatcccatcccacccttgtgctcatccagaactgctctacctctgaaatgctaaaatcaaaccgccccctctattttttttttttttttaagacggactcttgctctgtcgccaggctggagtgcaatggcatgatctcggctcactgcaacctctgccttccgggttcaagcaaatctcctgcctcagcctcccgagtagctgggattacaggcatgcgccaccacacccagctaatttttgtatttttagtagagacgaggtttcaccatgttggtaaggatggtcttgatctcctgacctcatgatccgcctgtctcggcctccggaagtgctaggattacaggcgtgagccaccgcacccagccccgccccctctcttaccataagctcttgtctgcaccgatactctaatacctccccatgttatacccatccttcagcctcctcaggatcctcattcatggagccctctgttctcttggtgtctacatgcagaacccccttttgtagatgtttccctctctgcccaccttagagtacagccacagtcagctgcttcggtttttttcttgccctttccctagcaaccttgatcctttgtcctttggttacccctgcacggtgcagaaccaccttccagtgcaccagcctctcaccacctctgtacatgtacccagtctgatgagcactgccatgaggttcacgtagcaggcagattgggactgctacacatccacaggcaccaaacccaactggggtcccacagtcctattatatggagtcagcctgcattcactcaccacaagggctctacttctatttattttttatttttaattttaattttttagagacaaagtctcactctgtcactcaggctggagtgcagtggtgcagtcttggttcactgcagcctcgacctcttgggctcaggtgatccacccacctcagcctctcaaagtgctgggattacaagtgtgagccaccatgcctgtctgaagcaacatttttgtaaggttgttatcaggtgtaatagtgagcggagccactcccacttccacctcttgaatctaggccccaaatggaggagataacaccatataatcatctctgattaaaagcctaggctgcatcttataagaaagaaccccacccttttgaggacattgtcttgcaattggtgctataaccaagttgtcagtaaatttaggtcagctgcttgtgagtgatggggtatagggtaaggccagttgatcccatggctgtgagcccactgctacctttctttgctatgaaatgaggtccttgattagctgcagtgctttgcagaatgccacaatgctggatagagcattctgtaaatccacagatggtgggtgctggaaaacacattgcagacaggaaaggcaaatccacattcagaatatgtatctgttccagtggggataagtcattgccctctctgaaatggaagagacctaatataatcaacttgtaggctggttcctctgggaatggtgccatattggggtcacgtattgtctttgctattggcagcattacgtggattgggaggcttctaagacagctaccccaagttaggttagcagggctttcaaggaaaagctagtctccttggagacaggaaggcttccctctggtaagggaagctcagaatgacctgggagttcaagattgtcagtttcatgtggatctaaccagatatccctcttccaagtttcaggatctcattgtttcctatcagtaccctaattttcacatgagaaatggtgtgttgggggaattcagctgttgtaattcaacaactcacacaaatttgtgtttgattttcagcagtagcagctatgtggctacaaggaataagattctttttttttttttttttgaggcggagttttgctcttattgtccagactgtagtgcaatggcacgattttggctcactgcaacctctgcctcctgggttcaagcgattcttttgtgtcagcctcctgagtagctgggattacaggcatgcgccaccacgcccagctaattttgtatttttagtaaagacaggtttctccatgttggccaggctggtcttgaactcctgacctcaggtgatctgcccgcctctgcctcccaaaacgctgagattacagatgtgagctactgcacccggttgaaataagattttttttggggggggtgggtgctgttagagaagacttctgcttctcagaacatgactcaagctgagtgttaacagacctgagatcactttctctttgtaaatgttcaagtgcactcaaaacaatccatcccatgccaccatctataaagtcatcattactgccacactggcaaatatagaagtcactcctacagcacatgtttcagttaccatttcaccacagtaaactgcaggcttgatgaattgtgatgcaagtgcatacagtgggttatagcatcagttttccattgacagagctcaacaccaagccagttccgaaatcccatctttagggggtctatcttctgggactattccttctataccaagtctgtaccagtctgggtccagtcagaagacttaacatggaaagtttaatataaagaattattggcctggtgtgggggctcatgcctgtaatcccaacacttggggataccaatgctggtgggtcagctggggtcaggagttcgagaccagcctggccaacatggcaaaaccccatctctaataaaaatacaaaaaattagccaggcgtggtggcaggcgcctgtaatccccagctacttgggaggatgaggcaggagaactccttgaaccttggaggcagaggttgcagtgagcccagatcgtgccactgcactccagcctgggcaacaagagcgaaactctgtctcaaaaaacaaaacaaaacaaaaaggccggatgcagtggctcatgcctgtaatcccagcactttgagaggccgaggtgagcagatcatgaggtcaagaaatcgagactatctggccaacgtggtgaaaccccatctctgataaaaatacaaaaattatctgggtgtggtggtgtgcacctgtagttccagctacttgggaggctgaggcaggagaatcgcttgaacctgggaggtggaggttgcagttagccgagattttgccactgcactccagcctggcaacagagtgagacgccatctccaaagaaaagaaaaagaaaaagaaaaaaattatttaactgtgataaaggagtatatgatatggttggacatggtagctcacgcctgtaatcccaatactttgggaggccgtggcaggcagatcacacaagcccaggagtttgagaccagcctgggcaacatggtgaaaccccatctctacaaaaaaaaaacaaaaaaaacagctgggcatggtggtgcacacttgtagtcccagctactcaggaggctgaggtgggagagtcacctgagccctgggaggtcatggctacagtgagccaatcacaccactgcactgtagctgggcgatagagtaagactgtcaaaaaaaaaaaaaaaaaagaaaaagaatatgagatataagaaaattttatgatagcctggggccaaggaagagtacccaaggaatgacaaacttggaagagggagcctgtcttcaggctagggttcagacctcgttggaaaaatacagttgcagcccactggatggcagagaagttggtttgcccaggttggagctggtctataatatcagacaagcaagaagcaaccctctgaggccacaagggatgtaaagacgtaggcaagctgcaactctcagcctggggtgttaggtggacggtgtgaatgggagtgctggtgcaggcaggaggcctgcaacacacagtgtcaatatggcaaggtaggccgggcatggtggctcacgcctgtaatcctaacactttgggaggccgaggtgggcagatcacctgaggttgggggttcgagatcagcctgaccaacgtggagaaaccccgtctctactaacgataccagtttgagaccagcctggccaacatggtgaaaccccatctctactaaaactacaaaattagctgggcatggtggtgcgtgcctgtaatcccagctacttgggaggctgaggcaggagaattgctggaacctgggaggcagaggttgcagtgagccggtattgctccattgcactccagcctgggcaacaagagcaaaactccgtctcaaaaaaaaaaaacaaaaaacacacaggctgggcgaggtggctcacacctgtaatcccaacactttgggaagccgaggcaggcagatcacaaggtcaggagatcgagaccatcctggctaacacggtgaaaccccgtctctactaaaaatacaaaaaaaattagctgggcgtgatggcaggctcctgtagtctcagctactcaggaggctgaggtaggaggatggcgtgaagtcgggaggcggagcttgcaggagccgagatcgtgccactgtactccagcctgggcgacagagcgagacgctgtctcaaaaaacctgtggctgggcatacaggtgtgcagaggacattggtggaaacactagtgcacaggcaggatgcagccagtggccaggcatcttggtatagagaggaagtggggacctggtgtgggcaggaagcctggagtgcagcgtctgtccagacagcttgagaaggtgatccggaaagtgctgcgatgttgctgagggaccatgctttgcggatgtgtggctggggcggagcagtactagatattctcacaccctgactgctggctgaccaccaaccctggaagcacaggagggccccttcctagtgcagtgtccttccagcgccctctgctgagaaagcttaacatgctcactataaaggagaaatgtttaaaggaatgctgaccattaccacagaacatgggttaaagggtgaatttggagctgagaggcaatgcgttgataactggcatgctagatttgtatgaatatctattttcctatcagatgttttttcacccaatgattttagttatagaatgtcaaaagaaatgcatatgggttgtaaattcaaataatgccaaagtatatacagacatgctttggagatattatgggttcagttccagactacaacaatataatgaatattgcaaaacacgtcacatgaatttttttggtttcccagtccatataaaagttttatgtttacagtatactgtagtatattaggtgtgcaatagcattatgtctaaacaaaagtacgtaacttaaaaatactttattgctaaaatatgctagtgattatcagagtcttaagcaacgtgtagtatttgtgctggtggagggtcttgcctcagtgatgatgactactaattaatctgagttgtggttgctgaaggttagggtggctatcataatttcttaaaacaacaatgaagttgccacaacagtgggctcttcctttcatgaaagatttctcagtagcatgcaatgctgtctgatagcattttatccaaaatagaactttcaaaattggagttaatcctttcaaaccacgccgctgctttattaactaagtatatgtaatactccgaatcctttgttgtcatttcaacagtgttcacaatagtagatgccatctcaagaaaccactttcagccgggcatggtggctcacacttgtagtcccagcactttaggaggccaaggtgggcagagcacttgaggccaggagttcaaaaccagcctggccaacatggtgaaaccgtgtctctactaaaaatacaaaaattagctgggtgtggtgctgggtgcctgtaatcccagctacaggaagcctaggcaggagaattgcttgaacctgggaagcagacgttgcagtgagccgagatcgtgccactgcactccagcctgggtgacagagcaagactctgtctcaaaacaaacaaacaacaacaaaaaaaaaaaacccactttctttgctcatccataagaagcaaatccttatttgttcaagtgctgagattgaagcaattcagtcacatcttcaggcctcacttctaattctgattctcttgctatttccactgcatctgcagagactcctactgaagtcttgaacccctcaaagtcatccatgaggattggaatcaacttcttccaaactcctgttaattttgatattttgacctcctctcatgaatcataagagtattttatttttattttttttattttttgggacgaagtctcattctgtcacccaggctggagtgcagtggcatgatctcggctcactgcaacctccgtctcccgggttcaagcgattctcctgcctcagcttactgattagctgggattacaggcacccgccaccacacctggctaatttttatatttttagtagagacagggtttcaccgtgttggccaggctggtcttgaactcctgacctcaggcgatctgcctgcctcagcctcccaaaatgcagggattacaggtgtgagccaccgtgcccagccatgaatcataagtgttcttaatggcatctacaatggtgactcctttccagctgagattgcaccactgaaaacctttccaggctttcagttttgtccagatccatcagagaaattactagctatggcagctatagccttataaaatgtatttctaggccaagcatggtcgtgcacacctgtaagaccagcactttgggaggccaaggtataagaatcacttgaggccaggatttcaagaccagcctggcaacagagaccccgtctctacacacacacacacacacacacacacaaattttttagccaagtgcactagcatgcgccagtagtcccagctactcaggaggctgaggttggagcatcacttgagtccaggagtttgaggcttcaaggctacagtgagccatgatcacatcactgcactccatcctgggcaacagagcaagacaatgtctttctaaaaacaaaacaaaacaaaacaaaaaaaacgagagagagaaagaaaaaaatgtatttcttatataagacttgaaaattgaggccgggcgtggtggctcacatctgtaatcccaacactttgggaggctgaggcaggcgaatcacttgaggtcaggagttcgagaccagcctggccaacacggtgaaaccctgtctctactaaagaaatagaaaaattagctgggcatggtggtgcatgcctgtagtcccagctactcaggaggccgaggcaggataattgcttgaacccgggaggtggaggttgcgttgagctgagattgcaccattgcactccagcctgggcaacagagtgagactccatctcaaaaaaaaaaaagaaagaaagaaaaagaaaattgaaatcactctttccttgatccatgagctgcacaatggatgttgtgttagaaggcataaagacaacattaatctccttgtacatctccatcagagtttttgggggaccagatacgttgtcaatgagcagtaattttttttttttttttttgagatggaatctcgctgtgtcacccaggctggagtgcagtggtgcaatctcggctcaccgcaacctccgcctcctgggttcaagtgactcctctgcctcaatctcccgagtagctgggaccacaggcgcactccaccatgcccggctaatttttgtatttttagtagaggcggggtttcaccatattggccaggctggtctcaactcctgaccttgtgaactgcctgcctcggccttccaaagtgctgggattacaggcatgaaccaccgcgcctggccaatgagcagtaatgtttttaaaggaatcttgtttttttttttttgagcagtgggtctcagcagtgggcttaaaacgtttagtaaaccatgctgtaaacaatgtgctgtcatctaggctttgttatcccgtttctagagcacagatagagtagatttagcataattcttaagggtcctaggattttcagaatggtaaatgagcactgttctcaacttaaagtcactagctgcattaggccccaacaagagtgtcagccctgtccttacacgctttgaagccaggtgttgacttctttctagctatgaaaggtctagatggcatcttcttccaatataagactgttttgtctacattgaaaacctgttgtttagccaaccacctttgtcaatgatcttcgctagatcttctggataacttgctgcagcttctttgtcagcacttgctgctttaccttgtgcttttacattacagagatggctttttcccttaaacctcatgaacaaacctctgctaatttcaaacttctgcagcttcctcacctgtctcagcctttatagaatttaaagagttagggccttgctctgaattaggctttggcctaagggaatgttgtgatcttatacatagttcactaaaactttctccttacccgcaaaaaggctactttgctttcttatcattcctgtattcactggagtagcacttttaatttccttcaagaacttttcctttgcattcacaagttggctaactggcacacgaggcctagcttttgtcctgtcttggctttcaacgtgccttcctcactaaggttagtcgtttctagcttttgatttaaagtgagagatttgccactcttctttcacttgaacagttagagggtttttaattagcctaatttctacactgtgtgtctcagggaataggaaggcctgaagagagagagagagagagacgatcggggaacggctcgttggtggagcagtcagaacacatacaacatttatccgttaagctcaccatcatgtatgggtgcagtttgtggcaccccaaaacaattatagtagtaacatcactgatcacagatcaccatatcagatataataataatgaaaaagtttggaatattgcgagaattaccaaattgtgacacagagacatgaagtgagcacatgcagttggaaaaatgacgctgatagatttgcttgactcagtgttgccacaaaccttcaatttgtaaaaagtacagtaaagcaaagtgcaacaaaatgatgtatgcttgtagtataaaagtggacagctccgcaggtgtctaccccatctaccaccctccccaaaggtaatcactgtgtctggtttagtatggaagtctcttgagcatttttctgtatattaacacagaagtaaaataatgaaatagcatttattgtggttcttcctatatggcccatagtctcgtttcaagtatcaatttccaccaatttgaaatgctagctttattatttgctcaattctgagatcttttcctagacgccatcctcttccattgatctatttgcacattcctgtgccaaaataatagttttaattaattttatatagtgtgtgtatctggtatacatctgttctcatattttcaaaatgttcttaaatattttgtggtatttcctctttcagatgatctttttcccctatatgaacttttttttctttttctttttctttttttttttttttgagacagagtctccctcagtcgcccaagctggagtgcagtggcacaattttggctcactgcaacccctgcctcccaggttcaagcaattctcatgcctcagcctcctgactagctgggatttcaggcatgcgccaccatgcccagctaattttgtatttttagtagagatggggtttcaccatgttggccatgctggtctcgaactcctgacctcaggtgatcttcccaccttggcctccgaaagtgctgggattataggcgtgagccactgcgcccagccccccatttgaacttcagaatcagtttgtgcattacccttccactggccagataattggcagaaggtgtttattggaattcctgtacatttatagatcattttggatattgctccatgttttctatatccttggaaaatatttaattttgtaaaattttcattagatgtatcatttgatatcttacagttttatcgccataattattaggatctcttaaaagttgtatttctttcttttttttttttttgagacggagtctcactctgtcgcccaggcagctggagtgcagtggcacaatcttggctcactgcaacctctgcctcctgggttcaagtgattctcctgccttagccttctgagtagctgggattacaggcacccacaaccacacctggctaatttttgcatttttattttaattttatttatttgtttatttatttatttgttgagatagagttttgctcttgctccccaggctggagtgcagtggcatgatcctggctcactgtaacttctgcctcctgggctcaagcaattctcctgcctcagcctcccgagtagctgggattacaggtgcccaccaccacgcctggctaatttttgtatttttagtagagacagggtttcaccgtgttggctagactggcctcatactcctgacttcaagtgatctgcccacctcacctcaaaaagttgtatttccaatcgattcttgctatggtatgaaaatttcttggtatagaaaatagattgatttttgttgatcaccctatgccctctgtgagagtctcgtattcattgttccctagactactttgggttttttttttttgagacagggtctcactttgtcacccaggctggagtgcagtgatgctgtcttggctcactgcagcctcaacctcccaggttcaagcgatcctcctgcctcagccccccaagtagctggcatgctacttgtaactacaggcatgtgccatcacatgcagctaatttttgtattttttgtaaagacagggtttctccatgttgcccaggccagtctcggtccactgagctcaagcagtctgcctgcttcggccccctaaagtgctcagattacaggcatgagccacctcactccttactttggattttctaagtagacaatcacattatttgcaaatagaaacaactctgctccttcatcaaaatataaacatctctttatttttttttcttaaattatgttggctagaaccacaacaaggatgtcaaatagtaggtaatgatgggcatattcctgatcattaatgagaaggtccctgaaatgataccggctgaaatgcccttcttaaacactgtcttctcttggtgtcctggaatagtgcccattccttcttagtcccttttgctaccccttttcccccactcttgaggtatgatgacatacctcaagctccctactccaacttcccatgcagcacacactcagtgatccatgagcatttcacattgcaatcatctcatgcctggttgtgatttgtgatttggttgcctgccataagccaagcattggcagattaacatgcccaatccaggacgactcccagcaccatctcactgaaaagctcctcttggatttctttcaggcactgctaactcagtacctctaaaactaagttcatcatcaataagcatagagctgaacccctgggtataaagcccacaccctgattcattaagaaccagaaataggccaggcactgcaggtcacatctgtaataccagcactttggaggccagggtaggaggattgcttgagcccaggagtttgagaccagcctgggcaacatggggagactccatctctacaaaaaatacagaaattagccaggtgtggtagtgcaccctggagttccagctacccaggaggctgagatgggaagatcacttgagcctgaagctgcaaagagccatgactgtgacactgcacctcagcctgggcaacacactgagaccctctctcaaaaaagaaggactagaaatagaagaaaggctttcttctctgagagaccttttctgagagtctcatttcctgctaaagctggcctgagccagccacttcactttagttctatctcagtttgtgccttggatgttggccacgcagcctgcctggctcaagagctcctgccatccttggacacttgccccaagaaccacatccttccctgccaacaccctctgctcccttgcctgctgtccctagacatgcatgtggtcagttcacccaactttctggtcatcaccctcctccctccctctgggggtagagagtggagacttcctctacagccttgtggaagacaaatggaggctttaggaattcctctggggttcactccatacggatgcagggtaatgaggctaatttctgctcatctctgtgtgggcaggaaatatgagctgtacagcatggactgggacctgaaggaggaactcagggattgcctggtggctgctgcaccctatgggggccccattggtatgttgcccctccaccaccacctgctctgggaccctgggatgaactcaaggtccttgattcctggggccctgctgtcaggttgttcttgttgccaccccccactcaccctgctgagatgcttttacttctggtttttataggcctgcttcacatggggtgggcctggggagccaggatgtgaggcctgcttcacatggggtgggcctagggagctaggacagaaggtctcttctcaaactgcagcactgctgaggaacccctggcggaaggagaaagctgctagtgtgaggccagtgctcgatatatactctgcttccggcatgcctctggccagcctgctggtgagcacttctgatggtccctggggctcagggctggacagggtttcctcacctgaggacagccttaggaacctctctcccctgcagtggaagagtggacccgtggtgtccctgggctggtcagctgaggaggagctgctctgtgtgcaggaagatggtgctgtactggtttatgggcttcatggtgacttccggagacacttcagcatgggcaatgtaggggtcacagagggctggggacgcggggtagagtttatgaccctgtggctcccttaacccatggccccctttcctcaggaagtgctccagaaccgggttctggatgcccggatctttcacactgagtttggttccggagtggccatcctcacaggggcccaccgcttcaccctcagtgccaatgtgggtgacctcaaactccgccggatgccagaggtgccaggtaagccctgacaccgctgagatagccaagcagtacccacagatgtgcctctagcctgtgagacccataaaaacagaagctgtggctagagacccatagaaacagaaacggtgggccttggtcatcctaacactgtccttttccctggccataggtctgcaaagtgcaccctcctgctggactgtgctgtgccaggaccgagtggcacacattcttctggctgtggggcctgacctttacctcttggaccatgcagcctgctccgcagtggtaagggccctgagtgggaatgaagtggacgggctgggttaggcaatagggaggttctgaaaagtcagtatgtatctgtcccacccctaccctggctctgcctcagacgccccctggcctggccccaggagtaagcagcttcctacagatggctgtctccttcacctaccgacacctggcactcttcacagacacaggctacatctggatggggacagcatcactcaaggtatgatcctggggcaacacaggggtactgtgccttgtccagggtacaagatcttttggtgatgcgggagggcttttcgactagaatggtgactgctgggacagggccatgacattgcccacaccatttcaggagaagctatgtgagttcaactgcaacatccgggcacctccaaagcagatggtctggtaaggatgggggtgttattgctgggggtgtgggtgagacatagcttgcttcctgggacaatcagttccttgattcgtcatgtctactggccaagcctagtggagtttggatcttaccttctctgccattgcacacttgaaggaaaccattgtcctctgtgggccacagctgccttgagctgagagctcagggataagagggaagtggagaggtcagtgtacagtcagtgatgcaagtgtatacaggctgtcccgagacaaaggattatgagcagccatgtgggagacatggccatgggacagtgtctagccagtgtgtatatgctgctcacaggtgcagccgtcctcgtagcaaggagagggccgtggtggtggcctgggaaaggcggctgatggtggtgggcgatgcacccgagagcatccagtatccttggagggctgcctgtgtgtggagagaggggaggggagggttcacctgccccgtcccatctgtaggtgctcttaggagccttaaccaagctcaggtttgtgctggatgaggactcctacctggtgcctgagctcgatggggtccgcatcttctcccgcagcacccacgagttcctgcatgaggttccaggtgaggccttcacaagggcaccacataacccaaggtggggactcctcggcaccccagctgccctgggccagtgccacagagcaggaatagggtgttgaggcagggctgagggtttccctgcctttctccctcactcaccaactcccttccccagcggccagcgaggaaatcttcaaaattgcctcaatggcccccggggcgctgctcctggaggctcagaaggagtatgaggtaaagccctgggcttctctcccagtcccagaatggttcctcctgcccctgcgtgggcatgtgtgagcatagccaggtgccacctgtcaagagaggggtccaggcaggacactggtctgggctggggagggctggctcatgtaaactgaagagacactatgtcctccatgtggtgtgatagggacgggcagagcatccccactatccccacccagtctgggttactattgggaggagttctcaaggcccccctaaaggcagctgtgggctgatacgagatgatgtctgtgggcacctcaggtggattgagtgggctgagggagttggggctccagcctgtgcagctcctccaacccagcttatttgaaccacaacccagaatggttaggggccagatgtgggagtgttctctgtcatgatgccctggctctggactgctccccaccagaaagagagccagaaggcggacgagtacctgcgggagatccaggagctgggccagctgacccaggccgtgcagcagtgcattgaggctgcaggacatgagcaccagccagacatgcagaagagtctgctcagggttggcctggatggccgggccggggagggtggggctgggagggggtgggatgggcagcagggaagctctctcctatcgccctctggctcttctcaggccgcctccttcggaaagtgtttcctggacagatttccacccgacagcttcgtgcacatgtgtcaggacctgcgtgtgctcaatgctgttcgggactatcacatcgggatcccgctcacctatagccagtatccctgtgcacgccagaagggtaccctacagccaggggtggcaggggaaggggctggagatgcgtctgcaggtacctggcaagcggggcttattctccaactggatccttaaccgaggaaaatacagatataagcagctcaccatccaggtgctgctggacaggtagggtaagcccaagggtgcagtgagcgggctgtcaggggggtgggcattacagccttgggtggggtcttatggtcactgctcctgacctatctaggatgtgggaggcctgatgtgcaggctgaggccactctgctccctttctcctccacctcactccttgtatcctttacccaccgggtctaccaggctcgtgttgcggagactttaccccctggccatccagatatgcgagtacttgcgccttcctgaagtacagggcgtcagcaggatcctggcccactgggcctgctacaaggcaaggatgtgggatggggtccaagggcatttagaggattccaggccctggtgaggtggaggaaatagaaagtgtagaactgcgctgggcacggtggctcatgcctgtaatcccaacactttgggaggctgaggcgggcgaatcacctgaggtcaggtattcgagactagcctggctaacatggtgaaaccccgtctctactaaaaatacaaaattagccgggcacggtggcgcatgcctgtaatcccagctacccgggaggctgaggcaggagaattgctttcacctgggaggcagaggttgcagtgagctgagattgcactgctgcactccagcctgggcgacagagcaagactctgtctcaaaaaaaaagaaagaagtggcgggggcggaggaggagggaaagagagagaaagaagaaagagagaaagaaagaaagaagaaggaagggagggaggaagggaactgaaggggtgggtcctaagggcttgcaggagtggagagtgaggaatggcatccagatgtttgtgacaccccgcatcccttgcaggtgcaacagaaggatgtctcagatgaggatgtggctcgagccattaaccagaagctgggggacacgcctggtgtctcttactccgacattgctgcacgagcctatggttgtggccgcacggagctggccatcaaggtgtgggtgcccagccctccacagacactctgatgtggttgttcagggcccccatgccagctccttctctctgtgccttccttctcacctcacagctgctggagtatgagccacgctcaggggagcaggtaccccttctcctaaagatgaagaggagcaaactggcactaagcaaggccatcgagagcggggacactgacctgggtgagggcaaggctggggggcccctgggctaagtgggagcctggctggaattcccactccaccttactctcctgcagtgttcacggtgttgctgcacctgaagaacgagctgaaccgaggagattttttcatgacccttcggaatcagcccatggccctcagtttgtaccgacaggtgtgtgtagtgggcagggttgtggtgtagccttctgagcacttgagttggccttgctgactgattgcctgcctgtggccccagttctgtaagcatcaggagctagagacgctgaaggacctttacaatcaggatgacaatcaccaggaattgggcagcttccacatccgagccagctatgctgcagaagaggtctgagatccatggggcgtgtggggcgtgtggggcatgtgggctggggctgttggtccggttccttcaggaatctaggccttcgtgttgggtgcacactccatctggtcctcactgtgagggagactctgacgtgaggccaggatgggggttagtgtcagaggagctagccatccctctaggacatcagagtggtgcacctagcaggcaaggctgaccctggcgaccctgggcacagggatgggggagaagactgtagcctgggtgaggagggcgagggtcctgcatgctgtgagttcaggccttccttcttgtctttatagcgtattgaggggcgagtagcagctctgcagacagccgccgatgccttctacaaggccaagaatgagtttgcagccaaggtttggcccacctttttccaagagcctcctcgtctcctggtcttccctcctggtccctcatccccatcatgcctcattatccgggtccccaggctacagaggatcaaatgcggctcctacggctgcagcggcgcctagaagacgagctggggggccagttcctagacctgtctctacatgacacagttaccaccctcattcttggcggtcacaacaagcgtgcagagcagctggcacgtgacttccgcatccctgacaagaggtaggtgagggcccaggctgcatgtgggtcccaggaccacctgcctctcctgcaacacctccaagcccagctttcctgcaggctctggtggctgaagctgactgccctggcagatttggaagattgggaagagctagagaagttttccaagagcaagaaatcacccattggctacctggtgaggcagggtcctccctccagcccacttccagtgagggtagtcttcgggagagagggctaggcagggagacagataggatggcccgttcatgctcctgttcagctgcccgcatagttagcgagtgcttcctgtatacacatttgtgggcaggcatcatctgctgtgttgggtgcactggaggatgggtccaagtttgcctgcagatgttacggggagagagaatgagctgctttccccagggagggccacagggggcactatgtgctagagggaaagtcttgtctgaggagggtggagggggcacagggagggtgcatatgggaggcagtggagatactgagggctgttttctgtggtgggtagttcagaggtgtatagggcaggtttgagaatgtcaatcacaagagaacacaggaaatgtgagggctggtggcaggaacgcctgttgcaaggggtaatggtgggtggtagagcagaagcgtggaaataattggtctcaagtctctgacagagctttggtttaggtgatttctgccctaagaatgttgagatcacaactgtctgtgcatgggggttgggggattatatgtactgacgggtgtatacatatagaatatatatggacgatgtatgcattgcgcctctgctcgtaagagagaggacaggagggctgtgcattaccttctccctccacccgcttcctctcctccaagccttttgtggagatctgcatgaaacaacataacaaatacgaagccaagaagtatgcttcccgcgtgggtcccgagcagaaggtcaaggctttgcttcttgttgggtgcgtcaactgagggcctgtgggtgctgggtggctgagctgtgggctggtgagaggcagggtttgtgcccttgagcagccccaacaccacctcctctcttgctcaaaccacagcgatgtggctcaggctgcagatgtggccatcgaacaccggaatgaggctgagctgagcctcgtattgtcccactgcacgggagccacagatggggccacagctgacaagattcaacgggccagggcacaagcccagaagaagtgaggagtccatcctgtacatctcaagcaaggggttcctcccctagcacctgggcttggcagaagggccatagttcatccagctcctcccctagagcaatgctgaggagcgggggcatggtagcagggctgtctggttttaaataaagttggaacacttcacagtgcttgtcttacacagtccagcctaagcaaaggcaagctcaagacaggatcctccagacaccacagcaaaactccatgtgttccgttgtgttgggaccggaggtgggggcttctccagccatactcgcaagaaacgtgtcctctccacagttaccaaggaaagctttctctatctcacagctcctaggaagattatagggagagatggcacaaaacttaagcaccagctcaccaagaacatactgtaaagcattctgtgtgtgtgcgtgtaaacacgcaagaaccacgctaaacacttttgctgcctgtacttcctttattcctcgtgacagccctgtgaggtaacatcaccccactttacagaaaggagattgaggaccagggagttcgataataacaaatatgtggcaaaacagggatttgaaaccccgggccaagtgcaagctggaactggaatcgggccctctgtgagaagggagcctgaggcaaggccccaatttgcactgcagtggtgattggaggactaatgagaagtgtgtggcctgcgggccataggggtcagggggtggtggcctttggaactcttgcccactgaactgtggtgagcaattccaagttgtctctgggccaaatagagaaggaggatggaagatttcaattctgccaaaaagaaccatgaacaccagacccgcaatcagtaggagtacccgcggggccctctgctctctctatctagccttccgttggcactccagtgcaccccctctgctctccctgtctagccctccgttggcactccagtgcaccccctctgctctccctgtctagccctccgttggcactccagtgcaccccctctgctctccctatctagccttcccttggcactccagtgcaccttggcttcatgcccagggccccacccaacactgagggcattgccttttcctttgtcgcccccactttgtctacaaggaggaaaccacagccagagggagtgcaggcctcactggagcttcaggcctctccctatttaacacccctagggccgaccatgcttttagaaagacagtgagagactcagggcctgagaaggtatttctttttttccttttcctacctgacttgtaaatgaaagtttgtgaaagtccttcaaggagatataagtcaaatggtaaaataactatcatgctcgccattcattatgtgggtcaagaatttggacaggttgtaacagggatggtttgtgtctgtttcatagtgtctgaggcatcagctggaagactaaaaggttgatagctaggggctgaaatcatgtgaaagcttgctaactcacacacttggtgagtgacgctggttcttcactgggaccttagctggggtggtctgccagaacacctgcaacatggtggctgggtcccaaggacaagcatcccaagagggtgccaggtagaatctggactgccttcctaacctagatttggaagttacgtggtgtcacatctgctagagtatttgtcacagcagtaatacaggcccaccccaccaatttcaaggggaaatagactccacctcttttttttttttttttttttgcgtggtagagatggggtctcgggggtctccttatgttgcccaagctggttttaaactcctgagctcaagcagtcctccctcctcagcatctcaaagtgctggggttacagcatgaaccactgaacctggcctggactccacctcctgatagggagtagcaaagttctggaaatactgtggctaggttttggaatcacaatctggcacagcccatcagctttcccttttggaatcagcagacaagaggaaaggaaataatccccaatgctgggctcatcattctgggcttttttttttttttttttttttttttttttgtccccagtcttggccccacaattcctcactgccctggtagctctttgatgcctttaaaaaatgttttcccagcttttcgagttctcaatgaaaaaggattgctatcaaacaacccagttttcctctctggaaagggaggcttgaccagtgcttttagaatgtacacaatacaaaacccacatctccaaagtaacatacagtatatttactcataggctatgtaaacaaacactgtacatatgaagttttagaaatatgtgagaaataacttttaactgatgacaaatgtatatcaacagtgatttcaactttataaaaggtgtgtgtgcatgtagagaagcattggaattgtctatggggagagttgctttaaaaaggcagttttgtatacttttttgtaaagttaatcactgatttgccccccacctccacagtttattataaaaactttcaaacatacagccaggtagaaataattttacagtgaacatttgtgtaactaccactggattctaccattagcatcttactatatcacacatctgttcatctatccattcctctatgtcaatccatcgtatttttcatatatttcaaagtaagttgcagacatcagtacacctccccctaaatacttcagtatgcatttcaataactagagttcatttttggtttgcaattttttttttcttttcaggcaaaatctacatacattgcaatccacagatcttaaatgtaattttctaagttttgacagatgtataagcctatgaattgtgacatttaaaaaccagaactgggattttcttttttcaaatccttgcttactcaattgaaattagtgtgagatgccttctgccctgagcagtttgtacagcaggcctatgcctacatgggtgggcagggccaagtttcgtccaatgtatgacgctaggattggggctaggaactaggactgtgtagctggaggcaaagaatctgggaacatttcttcttgtatcagtggtagccagtgcagggagaatcagggcaaaggctgggcgcagtggctcatgcctgtaattccagcactttgggaggcttaggtgggtggatcacctggggtcaggagtttgagaccagcctggccaacatggtgaaaccctgtctctagtaaaaatacaaaaaaattagctgggggtggtggcgggtcctgtaatcccagctacttgggaggctgaggcaggagaatcgcttgattgcttgaacccaggaggtggaggttgcagtgagctgaaatggcgccattgcactccagcctgggcaatgagtgaaactctgtcttaaaaatatatatatatatatcgagcaaaggctcctacaactcaccttctcagggtaaggggctgtatgtccagtctcttagatacaaagttccagtgaaagactcttggggttggccaggcgcagtggttcacccctgtaatcccagcattttgggaggctgaggcaggcagatcgcctgaggtcaggagttcaagaccagcctggccaacatggtgaaaccctgtctctactaaaaatacaaaattagccaggcgtggtggcgcatgcctgtaatcccagctactcgggaggctgaggcaggagaatcgcttgaacccgggaggcagaggttgcagtgagccgagatcgtgccattgcactcaagcctgggcaacaagagcaaaaactccgtctcaaaaaaaagaaaaaaaaaactcgggtttgaacagtgtggcctgcaaagggacttggctctcatttacttcacctttctatcttattgccttgctttattttcatttcagcatttaggaaattttcttgttcttttgtttattgtctgtgttcctatccagaatgtaagctcctgagagcagaggcctcttctgtcctcttctgtcttattccctgctgtgtccagcacatggtctgcactcaataagtatttgttgcgagaatgactcattgttccatttactagaaggggaaaggaggccccgagaggggaaatgacttgcctaaagaaacaggagtcctttccccccatcctccagctctcctgatcctctcctttgctcataaaccctgtgactgttggggcacctgtggggtggctgcgaaatgcctacctgtaggtatgtgctcctgtgggttgggactaatgcaggactaggagtaggagggctctgcagtcccccatttgggtaggcttgggcacaggaaactgcctcctttcccttcctcagttctcttctcttccaggataaccctttactctgtgatgatgatgggcgagggagctcaggacactctgggagccaagtaggatggagggctgggcaggtctctacaggcaggcagctgaggagggggctctgtcttcttccaatggaaacagcatctgtgtggttgctgagctgaaccctccttcccagggtctccagggtctgtagttctccttggtctgtagttctgtcacccctgtgcacaccccacaaatgctttgaccatagtgcagctgtctcatggggagagaaagaactttcatttcctgagaatgggttacttgccaagctgaacatgcctaattctcaatacagccctgggaagttccaggaagagttgcagagggaggctcaggtcacccagcacatggtggggctggaaaccccgggctctttgactaccacgcccaacaacaatttttccaagtgtggtcatatccaaaaggggtccttcagataatctcaaagatgaacacttactgcaatcactatttcagttatattaaaaatataagtagcatgtcaaccccttctagggtaatacaaataaaaagtaaaaaaaaactaatcaacaaaaagaaacatattaagaaataatagtgtaaattagatataaggcaaaagtaagctggtggggtttggttctagagcatagggctgctatcccagctactgaggtacctcctgcgtttgcagtcattacttgttaggggttttcacactttgacttcctgcttttcacttttccattcggtgttgcgggatagattgagtttggacttaaggggatatgtgaatgttgggcgtggggaaggatccaccctcactggggtctgagcgttaggagagtaggcgtgtggactctgggcctttgggctggagtgtctattggtcagaggtgtcgggttcggccatttcaccctcacctctaggctggccctgctgagagggagagagagtcacaactcccactcaaggagagacttccctgctggggaggggacggcctgaggcccgccccacccatattcccaggccctggctctggttagcatggactaacttattccacaatacggaggagtggggcacagagtccctaactggcgccccaacagaaggcggtggtggggaccggagatggtaggactggagatggtaggggctgctgatgtgagcccacaatacggaggagtggggcacagagtccctaactggcgccccaacagaaggcggtggtggggaccggagatggtaggactggagatggtgggggctgctgggagccccttttgcgccgcagtgtttcctgccatgaagagttgccgccggtcacaacccttccccgggggcgccccgaatgtgggactccttccggcctggggtgcgtgagggggactcaggggttgcccggtctggaggagagactcgccgccacctaccccgggaaccgcagactctgggtctgggataaagcgtcccctacccgcaagctcggtttgtgcgctactgtgcaatctgtcttttgcctgcagacgcccagccgctcgccctgcgcgggtctcggaatgtccaggggtccctactggggatcacaacccggcgaaatgtcgcatttgccaccacctatctcgactgcgtaatcggctttcagccgcagacgctcaggtcctgcagcacccgcggggatccgtgtaggaacctgctgccgctggatggactgagcgattgcttcgcgggtgtcacgcaccagacgccgtgccgggagcgccgggaagggggtacgcgccccaaccccggccgggggagggcgcactctggctcctctctgcgttttgagcctcccctcccccgccaggcgtatcgcaaaaggcacctccatcgcagagcaccatgtgttgtgcttctactcagctcggtggcgagcggggccccagcatgcgcatctggaaagcgggggagattaccctggagctcgggtggggacggcgtgggctgacttgatataagacgacacccacggagccagatccgttctagggacttggcaggttcctctccctccccagtgagatccgtcgttctttgcagcaattaggggagggaaaaaaaagacccacagtatcacgtttggagagggttaggaagatggctctcgagttgcaggccgccctggtggctagacattggtgtagtttgtgcctggcctcggtttcctgatctgtaaactgggaagaaggcccaagtcatgaggcctgtgactgtagaatggctgaaggcactggtgcactcgcagccggtccttccggggtccagcttcccgaaggactgggcagccccggggcgaacccctctggagctaccaggagaacgtgcgaccgggttcggcgccccagccggcaagtgagcgcccagcggagcgcaagggcggggcccgcgcgggccggagacgcccgttcgctgtcggccaaccagcgcctgtctctgaacagccaatgaacacgcgtcttacagccaaggccgggtcgggagcgaggctgcggcgagtgcggcgctgacagagacgcgcgcgcgcgcgatcgcgctcggaccccggccgctgccgccatcactgtcgcccgcccagtcgcccctcagccgcttcccctcgccatggaggcgaggccgccgccgccgccgcggggctcggagccgcgggccgggcggcggccctgagggctagtggcggcccgaaacgccgccgcggagccgaggcggagccgctgtcctcgtccccagcggtcccgcccaacgcccgactctgtgagtgttcgcggccgctgcgcccgggtgggctccggaagggggagcggctcccgggggcggtgggaggggtcccgggccacagcccagagcccggagcccgaagccctaagccatcttttccgggtagaagcctgcgggcgcctgcaggttgattgtgcatccttgcgggtccgtcgcggggagggggtccccggaaacgtgccggcccgagtgccgacccctcgcgactgcccaggaactttgcatgcgtccttctgggaccaggccagggcactgccagagttgattctcagagaagaaacttagaacggcgagaacagaatttgctcaggtccatttaatgggaggaaagaggaaaactcttggcatgagaaaatttgcttttgcagtgaccaacttttctttcccttcaagtccacctccctcggtcccccggcccgtctcccaggcccctctccttgccgccctctcccaactgttgaggctgtttaagaagggaaataagggctgagagctgcccagaattcagaataggccaattgagaacgcaggtcccctccctttttactttcggtaaataaaaaattttttttgaaaaaattagttactaattatatctcctgaagattaaaaaaaaaaaatagcagagcagagtcctgtcttgagggtttcgtttttatttttgagatcactgatgatatttgtaagacaggaaaagaagaatgtgcaaatccaccctctgcagggtgaacgccatcagaagcctttgctcaggagagggattccggctctagaaccagtccacatcaccctggagatggcttcgtttgccacctgctagctgtgcaggcagcctgagaaacagaagatggtgggcgagaggaggactgactaggaaagggcgaacatcttcctgcctggccactcctttcagaaacagatctgatgctgtcacttgtttacttaaaaactccctcgcttttctttttcccatgggatgaatgaagcctaaaatgccttatcaggtcatacaaagcccttgacaatcttgcctcaatttactcctttacttttagcctaatcggatcctccaattctccttcccctcatcccgcttgctggctagtattcagagctgcttgactgccccctcacatgttgggatgtttttgttttatgtgatcctctttcttccccacctttacctgccaagctccactttttcttttaaagttcttctcatttgagaagcttcttgcgggcaggagctgtgtcttgcccacctttctatctcccgtggtgggagaatcctccaagttgtcttgtagattctttccaatctcttctctcttatgcctaggctctgtttatttcccggtatccacttcccaagagattttttcgtgttttgaaggcctgcttggagtacatgcccaggacttttagtatttctgattcccggcttccccatgtccatcccacccagcccccataagcagtcagcaggtgggaactggtaggtcccatatcccactggcctccaaaaaactgtctctgaaagactaaaagcccttcagtctcttttcacctctgcctgctcaaagtgacctggctgataccgtgcattgtaaggcatggtgggatcccggggcctgttctctgtttagccacttaacatctgggtgaaatacagaaccagaaaaaccacccctctgacttcagtacattcatgtgtcttccctttgccaggtgaattgcttgggatacaaaagtgaggaagtcagtccttaacctttgaggaactcagagtctaatgtaggacaggtggatataaatacatcacaggtgctataagattgtgataataataatagctattttttatttgccttgtgacaagctatgtaatgttttccatgaattccctcagtcttttcaacagtcataaaagggcttattcctactctacagggttggaaactgaggccaaacagtgggcaaatgagggaatagtcaagatttgaattttggccgtgtatttgcagagcctctgccaggctgtgtagggagcatcccctgcctgggtgatttgggaaagctttcctgggacgggggggccttcggatcatgaaggatgcataggagtttgcgcgtggtggactgcacacataggcaagagggagcagcacaagcaaacttggtggtggaaggaatccactgtccttggggaggagggaagaggttaatcatagctggatcaggtaaggacaatggagagctactagaggatttaaaggaggtcagggacttgggctgaaagaattttggaaagatcatttgggggcaatatagggccaaatgcagatgcccctgcaatataggaggcactggttgggtctgacagaggtagagtcacagcctcttagacccagaggaaggtgtagagagaatcctgctcaattttgggaaaagataattaatgcagatgagagaaaaattcaaaagttctagcaatacaaaagagtatatagagaaaaatgtccctcctaccctggccccaagtctcctgtctccctaacctcctccccagagatggctgaagttttcagtttatatggccttccatagacactgttgctttataaatatgtgcctgcttatccatactcctcccaccatgggacgtaccactcacaccttactgggtttttttacttaacatatttaggaaatcattctattatcaacatatatagagagttatttgttctttctgttgacatgcttttacttatttagttgtatggctgtactgtaacatctttgggttaaatatttgtttccaggttcttctcttacagcaatgaatgtccttgtacatactgtgttatgtgctcatttgcaaagttatctgaacaatatgcttttagaagtagaattactgggtcaagggatatgtctgcatttttgatttgcagacatggagccaaactgccacccgtttctggggggttgtaccaatttatcctctcccccaaagtgtatagctggatagatgatctttggagaattcaggaggatcaactacgatgctttttcagctattatatgcctacttttcctccacaaatcctcccccaccctatgcgattctagccagtttctttgaatttacagagggagatgttgaggctcagaaggataaaagtaacttgtgcaggatgatcagtgcgggtggtggtgggtgttttgttttgtatttttgcacccctcatgtttgtatttgccagcacctttcattggaggtgctcagtgtcagtttgtaaacattattgcattatttttctccattttcacatggaaaaaaatgagatgcaggggaagtttgagttatgagagggaaactggccaaatatagaatcttgtcattttacttccagtgcaataataaatgtttccaaatgacaaagctgaagagatgttttttgtttgtttgtttgtttgtttgttttttgagatggagttttgctcttgttgcccaggctggaatgcaatggcgctatcttggctcacgcaacttttgcctcctgggttcaagcgattctcctgcctcagcctcccgagtagctgggattacaggcatgtgtcactgtacctggctaattttgtatttttagtaaagacggggtttctccatgttggtaaggctggtcttgaactcctgacctcaggtgatccgctggtcttggcctcccaaagtcctgggattacaagcatgagccaccgtgcccggtgaagaaatggttttttagtgagtctgagtacaacaaaaatagcaataatataacactaacttaataaaactgaacagcaggcccaaaaatagcccaacattaaaatttattttaatgtattctctatggaaaagagaatccattaaatgtaaaactatttattttactctaaattcacatccatttgtgtcagtgtacaagacataatttttatagtagcagtcagtacatatagaatatgatttttgaattcttcaatagcataaaatattttatatttactcatttaagtatttgttcatttaaaatcacaggctgggtgcggtggctcacgcctgtaatcccagcactttgggaggctgaggcaggtggatcatgaggtcaagagatcaagaccatcctggccaacatggtgaaaccccatctctactaaaaatacaaaaattagctgggtgtggtggcgcgtgcctgtaatcccagctactcgggaggctgaggcatgagaatcacttgaacccaggaggcggaagttgcagtgagccaagatcttgccactgtactccagcctggcgacagagcgagactccgtctcaaaaaaaagaaaaaaaaaatcacagtatagtattccatgcatcgacagctgtagttttttttaaatttgtttttgtttttttgagacagggtctcactctgccaccctggctggagtgcagtggcatgatcacagctcactgcagccttgacctcctgggctaaatgatcttcccatctcagccacctgaatagctgggactgcacaggtctgtgccaccacgaccagctaatttttttattttttgtagagacatttttatgttgcccaggctagtcttgaactcctggactcaagtgatccacccgccttggcctcccaaagtgctgggattacaggtgtgagccaccactctcagccaacagctgtagttggtgcaatcctttttattcttttatttttttctacctttttgctattataaatggtacttttataccccttgttcaaatacttcttttggattatttccttggactcttactcccaacctgggctcaccaagtcagaggatacagtttcggtgcctaattgcaatctggaaaggttgaactagtttccagcactatcagcaatttatggggccatttcttgacaacccatctagtgctattacaaagaaatgtaatgataccttgaattaggtttaatttacattgctttggaaaaagagaccagtagctgatttagattttttgaaagaagtacagtgctgtgatatagattatctccaagatttatgtaactgaagccaacttgtggttgaagaaagatttggttgatgagattgaaatattgtggaagtttagaataggatcatagcagtataaaatataaggctagatgctgttcagttggaaataccaggcattgtgccggaagctggggacaccccagagtaacatagatgtgatgtctgtcctcatgacacttttaggttagtgcagtagacagacattaaaatcacctatggtaattatagatgtgatgaaaggggaagaatagggtgtcgggagtgtcagagaagttcagcagctaaacaacatttgcagttaaacatttgtgaaggccctgagctgagaagggatttggtagctcagggcagcgcttcgctaacttgaatgtgctcatgaaccatctgggaatcttgttaaaatgccaagtcctgaatcagtaggtttggggtgggacttgggattctgtgttactaaccagctcctgggtgaggcagatgctgctggtgggtggatcacacttggtgtagcaaggcctaattgagagcttggtgagcacctaaaactggctgaccatggtgagcaggaaggggcaggtggcttgcagtgacagagtaattctctgcctaggctgcactttagattcacctggggaacttagaaaaatcagggttgcaaatgccccacccgcagccattttaatttaattggtctcagttggggcctgagaatgtgtatacagtcatgcacagtataacgatgtttccatcaaggagagactgcatatgccacagtggtcccataagattataatccataattttactataccttttctatttttagatatgtttaaatacacaaatactcactgtgttagttacttacagtattcagtacagtaacatgctgtacaggtttgtagcctaggagcagtaggctatacaatatagcctagatacgtagcaagctgtaccatctcattttgtgtaagtaccttttatgatgtttgcagaattatgaaatcacatcaggactcatcctcagaatgtgttccattgttaagtgatgcatacctgtatatatattttaactccccaggtgattctaatgtgtagccaggcttgagaactagagactaaggacagtgttgagactagagaatggcaaggagcagagttgagggtcctgtatggcatgcaaggattttggactctatcctgaaggcagagctaaatctttgaaggatttttaagcaggagagtgaactgatctgatttgcaattgttaaaaagttcactgtggctgtagtccagagcagtagttttcaaattgaggtagataagatgatccaggggaactggaagaaaatttagaactttttattgtttttatctaaaagataagataaaacatttaatttaggaattgtctctggcatcttcttgggtctataggtcaaacagttaatgtgttaactgtagaactttgggtgtcctgaaggaagagactgaattctgcagtgagcagagacatatttatacatttgttctccatgtattgcaacatgttgttaacagtttatattaaccagttctcattgaactagcctttacaaaatggacatgcagagaaaccagtgatcaaagaaaatactaataatacaagcacaagcaaacaagttgtcagagctgacacttgtccaactcctgtgatgaattcttggtgagctattcaaataagtcagctcttactaaattggaaagtatcaggaaatttataagaaacatgaactttcgtgctctgtcattaataggaatcttgctttaagattccttttaatcgtatgtagaacccagctgcacggtggctcacacccataatcccactgttttgggagcctgaggtgcaggaggccaggagctcaagacaaacctgggcaacatagcgagaccccatctctaccaaaaataaaaaattagccgtgtggtgtcacgtgcctgtagtcccacttacttgggaggctgaggcagaggattgcttgaacccaggagttcaaggctgcattgagccatgattgcaccactgtactccagcctgggggacagagggagactctgtgtctcaaaaaaaaaaagaggaggaccgggcatagtgggtcacacctgtaatcccagcactttgggaggtcagggtgggtggatcacaaggtcaagagatcgagaccatcctggccaacacagtgaaaccccatctctactaaaaatacaagaattcgccgggcgtggtggcgtgtgcctctgggtaatttcagctactcgggaggctgaggcaggagaatcctctgagcccaggaggcggagtttgcagtgagccgagatctcgccactgcactcaagcctgggtgacagagcaagactctgtctccaaaaaaaaaaaagtatgtaaaaccttgagatattaaataataaaatatgaggctgtcaccagtatgaagacatttgaaaaccaaaaatttggaacataaaaagaacctctacattttttttgcagtgatgtttaaagataaaggatattccatcagatgctttacaaaattttgctaacttcaattattaaaatttatattttgagggttttttgcttttaagagacagggtctcactctgttgcccaggctggagtacagtggcacaatgatagctcactgcagcattgaactcctgggctcaagcgatcttcccaccttggccttccaaagctctgggactacacatgtgaaccaccatgcctggccagtttttaagtttattgttcttataaaagacaaaatggggccgggtgcagtggctcatgcatgtaatcccagcactttgggaggccgaagtggacggatcacttgaggtcaggagtttgaaaccagcctggccaacatggcaaaaccctgtctctactaaaaacacagaaattagccaggtatggtgggcacacctgtagtcccagctactcgggaggctgaggcaggagaatcgcttgaacctgggaggcggagattgcagtgagctgaggttgcgccgctgtactccagcctgggagacagagcgagactgtttcaggggaaaaaaagaaaaaagacaaaaaaacacatacccttggcagattcttcctgccccacccccaaaaggcccacttaaacaaaaaatggactgatgtactacatggaaaataattttgtcaggaaatcaaaatactgttggaagatgtatagaaaacattgctgaatatgtgaacaaacaatattagaacaaattttgcagtgtgggaagtttggtatacggttataaaagtacagaagcttctagcatgtctcagtatcgctagatactcttttttttcttttctttctttctttctttttttttttttgagacagttttgttctgtcacccaggctggagtgcagtggcaccatcatggttcactgcagcattgacctcccagtctcaagtgatcatcctacctcagcctctcaagtagccaggaccacaggcatgcaccaccatacctattttttttattttttatttttaggagagatgaggtctcactatgtttcccaggctggccttgaactcctggctcaagcaatccacctgccaaaagaccttccaaagtgctgggattacaggcatgagccaccgtgccaactgtgccaggcctagattaccttttaatagttacatccaagaataaggaccacttcttttgtgagctactggaagaaagttgtactggagaagacatatttttaatagtaaatgattgccttcataagaacattactatatggaataatagactgaatgtaaattaatggaacagctgctttgactgaacaaaagaatgaaattcattcattacttctctatgggcaggctgttgagtccacttatttgttaattatcttgtggtagagttgttgatgagttttgcatttttcttttttaaaaaaatgccaactttttgttatggtaagtggctacagtttgagtaatcctaatatgaaatccaaaaggcttccaaatccaacactttttttttttttttttttttttgagacaggttctcactctgtatgtagcccaggctggagcgcagtggcatgatcatggctcattgcagccttgacctcctgggctcgggtgatcctcccacctcagcctcctgagtagctgggactacaggcatgcaccaccatgcccagctaattttgcaaccagtaggaataatgcaaatagtacaaaatctgaaaaatacctaaatctgaaacacttctggtcccaagcatttcagataaggaatactcaacctgaacctagcaaatatcatttgaaaaaataatatcttaatctgtctcttcaagtaaaagtattatttaaatagtgagtgaaaaaggaactacttcttttcttagaaagaaatgtgcaggccgggcgcggtggctcacgcctgtaatcccagcactttgggaggccgaggcgggcggatcacgaggtcaggagatcgagaccatcctggctaacacggtgaaaccccgtctccactaaaaatacaaaaaattagccgggcgtggtggcgggcgcctgtagtcccagctactcgggaggctgaggcaggagaatggcgtgaacccgggaggcggagcttgcagtgagccgagatcgcgccactgcactccagcctgggcgacagagcgagactccgtctcaaaaaaaaaaaaaaaaaaaaaaaaaaagaaagaaatgtgcaatggtagagcgttttcctcgttggaattttttttacatgtaatcattataagctataacttacatattataaaattctcctttttaaaatgtacagttctgtggttttttgtatatgcatagagttgtgcagcttttgccactgtctagtttaagaacatttcatcaccccaaaagagaccctgcacccattagcctcacttcccattctctcctccctccagtccctggcaactactaatcttcctgtttctttggatttgcctattctggacatttcatataaatgaaatcatacaatatgtgaccttttgtagctggcttcttttacttagcataatgtttctggggttcattcatgttgtatcatgtatcagtacttcattccttcttatggctgaataataatccattatattgatatacgacatttggctaactggttcatcaattgatgaacatttatttgtttctactttttggctttatgaataatgctgctgtgaacattcatgtataaatttttgtgtagtcataggttttaatttctcttgggtatatatatatacctaggagtaggattgctgggttaaacggtgactaactttgaggggctgtcaaactgttttgtaaagtgactacccattcccagtagcaactcacaaaggttccagcagcaatacaataggggtccagtttctcccagcaatgcttaggggtcccaatgtctcccatctttgccaacatttgttactctctttttgattatagccatcttagtgggtgtgaagttgtatctcattgtggtttttatttgcatttccatgatgatttatgatgtgcatcttttcatgtgctgttggccgtttatgtatgttctttggggaaatgtctgttcagatacttggctcattttaaaatttagttattgctctttttattattaagttacttatatatttttagatataagtcccatatcagatatacgatctgtaaatattttttcccatctgtgggttgtgtgttcagctgtttgcgtggacatatccttttgggtagatctaggagtggaactgctgagtcaaatggtaactctctggttttttttgttttttttgtttttttttttttttgagacggagtctcgctctgtcgcccaggctggagtgcagtgacacgattttggctcactgcaagctctgcctcccaggttcatgccattctcctgcctcagcctcccgagtagctgggactacaggcgccccccaccacatccagctaattttttgtatttttagtagagatgggatttcacagtgttagccaggatggtctcgacctcgtgatccgcccgcctcggcctcccaaagtgctgggattacaggcacaagccactgcgcccggtttgaggaaccactgactttgttgaggaacagaaagaacgcctgcacctttttacaatcccagcagcagtgtatgagtgtatcagtttctccatatccttgtcaacacttgttgttttttttaactgtagccatcctagtaggtgtaaagtggtattgcattatgttttaatttgcatttccttaatgactcatgatctgactgtgattttgttgcatctataaaattctcataatttgacacatgaaaaccttagaaacaattttgtaacctaataaaaatctccaaatgtgtttctaaaaacatttccagatgatctaatgaagtaaagaatctaggcattggtcaccagtggctgttaaaaccattagggaactttataataaagggatcagtgtgacaatcttctgatcaatcataacatctctaaaattgggacaaccaaatcttatattctttctatgtgatactaggaagaacatatcattcatgaaatagtcttgcttgccccaacaaacagagtcaaaccttcctctgattagtgtagatctgattactggtttataggatataattggcaaatttagaatgtgaaaaatattataggacaaatgaacccatttacttcaaatgaatggcaagaaaaaaaaagtacacgaactgctacagattaaaaaagacttgaggctgggcgtggtggcccacgcctgtaatcccagcactttgggaggccaaggtgggtggatcatgaggtcaggagttcgagaacagcctgaccaacatggtgaaaccccgtctctactaaaaatacaaaaattagctgggcgtggtggcacgcacctataatcccagctactcgggaggctgaggcaggagaattgcttgaacccaggaggcggaggttgcagtgagatcatgccaccacactccagtgtgggcgacagagcaagactctgtcttggaaaaaataaaaaagacttgaatgaaacatattaattgaacataagtatagatcttgtttagatcctgtttcatgcaaaccaactgtaaaaagttatttatgagcccattgggagtaatttaaatttgaaaaccacttgtatattagatgatttttaaacaattttaattttttaaaggttattatagtagtatggttacattaaaaagaaagactcctttctcttacagataggtactgaagtattttggatgaaatgatgttgatatctggaatttgctttaaaataattcagcatgtttggaggattacagacgagacaagaattgccatacgttgataattattgaagctggataataggtatataagggtttattatagtattttctctactgttgtatatgtttgagaattcccatagtaaaaaattaaaagagaaaccactgtaagggaagagttttagtggatttcatgtccatttgttagaaatagaaaaatgtggccaggcacggtgactcacacctgtaatcccagcactttgggaggccgaggcgggcggatcacctgaggttgggagttcgagaccagcctgaccaacatggagaaacccccgtctctactaaaaaaaaaaaaaaaatacaaaattagcctggcatggtggtgcatacctgtaatcccagctactcgggaggctgaggcaggagacttgctttaacctgggaggtggaggttgccctgagccgagatcgcaccattgtactccagcctgggcaacaagagtgaaactctgtctcaaaaaaaaaaaaggaaaagaaaaaaaagaaaaagaaataaaaaaatgtagtatctttgattaattttcaaaagtatatcacagaagatagatatttgctagccatatttaaaaggaaatatttgtataatgggggtgaaaaaatgattatcacagtttagtaaacacagccatagtgcttcttcctttggattcatgtttctttttggttatgatagcattaaaacttggaatcaggcttttaaattgctctataatatattaaaatgagatttttcaaacataatgagaaatatttaatcatatggattgcactaaaatatttttaagatgggttttacattactattttaattgatggaagtaccattattgtgatcattatgtatttcatttgaaatgttttgtagtatttataggtattagtacctgtgttctgtttataaatgaacatgtgttggggatgtatactcttatttattggtggatgtgcagtaaaaggtttgtttgtggagaacggactgggcagggtatagagacttatttgatgtttattagagcaaatgtggccagtgatgatggtgttctggattggcttagggtgggaggagtggtgatagggatggagatacatggacaagtatgatttaagcagtagaggcattagggttctagatttctggctttttggaagagatgattgctagttaatgaactgagcttttgtgtgtgggaagaagttgaaacctggcccctgtgaattgtgcaagtagttcttaaatattgattgacaaatagcttaacgagcaactaattttcaaatattggttgacaagtggcttattacaatattgtaaatgcattgatactaccattagtaaagagaatgtcttcctttgataatgttagcagcactgttaccagagcagtgtgggatagttccaggactttcactgtctaaaaggaactggaggcccaagcttttacggggatacttctgctctcctggttcccatgtccccagtgatgtgaatgtccctgactcagtgcctctgctcacgctgtctgtgagatcactgccttccagtgcctcttacctcttgggcctgcccactttgttaacagggacagatttcacagtgatttccagccagtatttctctctccccagtttggggtgttagctagaatggtccctcaaagccctcaaacacggatgagaaatagaagaagctcagggagactatacctgggctaggttcttgctaccagctggtggaagacaaagaaaaccccttttcttcctgtatttcatgcccagtgagcagtagtgccatcagcagcagttgtgaacccctaaatcagtgattctcaatatgactgacatggtggggaagacgtaagtttgaaaatgcattttcaggctaggtgtggtggctcacacctgtaatcctagcactttcggaggccaacatgggaggatcacttgagcccaggagttcgagaccagcctgggcaacatagtgagaccctgcttctacagaaaaataaaagctagccaggtgtaatggcatgcacccatagtcctagctacttgggaggctgaggtgggaggattgcttaagcccaggagatcaaggctgcagtgaacataccacagcactccagcctgggcagcagagtgagacccctgtctcaaaaagaaaaagcatttaaaaaaaaaaaaggtttgttagtgtttgtctcaaaattttgcttaatttaaaattatgtatatatttgaataatatgtgtccatgttaatagttctaaaagtatatatagtatatatagtaaaaggtagttttctctccccctgcctttcagctttccctttccataggcatccacaagtactatgagcaatacttgtgaaaccatgctgaaatactacatgctcataaaatgtaagttacttaagtttggtatttcaagtaacaataagggaagataggagagttttatgtttatcaaaaggggtgaatgttatagcagattgagatgagatgttcttacctttgggtgggatcttaagtggagctcaattcggtttccccaatgttagtgggagagattacttaaaccatccatacttatccagttgtacttggtaagttttcaaaggttctactttgaagagggcttttgttgagcaagtagtggttaatagagcagctcagttacatgtgtaagttttttgatgtgggaaaagggcttttgtatacagaaggactattttaaaattatttgggctttaaattaacatgtattaaagtggtaaatttaaaacccagttttcttttagtcttgttattgtacttgtaagcataggcattttgtatagaaataagaatagtaattttcacctgcttgtcaattaagttaatataaatttaacagatttaattgctccaggccccttacttagtgaattaaatttccttagatgtttaaaatacatttacacagtcagtctgtcaggcacagtcagtccttgacaggtcagagttaccaccttaaacagaaacttcttaagctcttgggcaatctgtgatactaagaaattaaatttgtaaatgtagtaaaacaggttttggttaagacttccagtgcttttcattagctgaatctgaattaccaacatttaaaaaacacataccctaaacttaacgcaaaagtactactagtaccatgagtttgatataccatacctcattttattgctcatgtcttttctttctgggattgtgatgccacttacccaattaaggaggacagttttatcatctcagaaagccatggttatcagattaaaaatacagaatcatgatacagttattattggtcagagatttgagactgggaaagggaactaaggggtctgtgtttccaggataattctactcaagagatgctgtgcctttccttatgttaagagtcctgaatgtggcatcaaagggggaatccatgttcagagtttgttttgcaaccccccatacctttttttgagacaggatcttggtaggttgcccatgctggtgtgcagtggtgcaatcatggctcactgcagccttgacctcctgggctcaagtgatcctcccgcctcagcctcctgagtaagtagctgggaccacagatgtacgtcatcatgcccagctaattttttgattttttttttttttttgtagagatgaggcctcactatgagcctaggatgatctcaaattcctggcctcaaacagtcctcccgcctcagcctgcccaagtgctgggattacaggcataagccaccatgcctggccttttcttcaaaaataacccttcaatcaattttttttttcctggtcaaattggattttgtgtttcttttatatattccttgtcaggccctacagttattttaattttgggtgttggatagactagggttcatattccatgcctgccatgctttttgtgaacttgggcaaaatagttagctcttctgagactcacttttgtcacctagtaaatgggttcagctgtagtactctatgtatttgtttgttttaagcattagatagtgcgtggtaaatgcttagcacagttcttagcacatagtaaatctttaataaatgttagaaaatataatgatcttgattctctgtcttccctccctagtagttgatttggggcacagtgtagcattatttgaattatcacagaataactttttacctttctgattttaacaggggagagtgtgtaaaggatgggagagggaagagagaaaaaagctgagtaaatgtgatcaactttacagtctttattccctgaactatctttccctgagttatgtgacacattctccttgttttcctctttctatctttgtggccactcctcagttccctaggcccctcttctttgaccactccttgtttgagttaccaaagattccatctctggccttcttgtgttgattctacacgttcttcctggaagcacatgtccatggtttcagcttccttgctaattaggagaaactttgtcctcagaacccatctggattacagccaacagcctactggtctccattgggctatctcccaggtacctataacagtctcagaactgactcatcttccttttcagcgtgttatttttataatctctatcttgatgaatggcacaacacagtgacccaaactggaaacttgaatgttgttcatctggttggtgatctgttcctaactgttttacatctgtaacatttctcaaatttgcctattttccaccatttctcctatcccttaattcaggctgcttctcacctagatgactgctgcaggttcccttgttgtctactcattattagtttctcattccaagtcattgattagatggctgccaaaagtgatctctttaacttcccaactttagattctgtgaataaaatccaaactccttaacagagcaggccctcatgatccaactcctcttaacgttggtagccttatcttttctctgagcccactgccgcttgatccttggtggtgctgtgctctttcttgctctctgtctttggttggactgcccacctccctccttcttacttgacattataatttatcagatagagatcagctcctccagtcagcatttccttactgactactccaagtctgacccagtgtagattctgtgcttatatctgtcaagtcacttattgtatgataattcatacacttatatgataattcacacattggcatgtgtagattaaacatttatagtctcagaaggatcctgatagtccaaaaggtatagtaatgcagttgtctcttagtatcttcaggtgattgattccaggatcccccccatggagatcaaaatccagggatactcaggtgccttatataaaatggcatatttgcatgtaacctatgcacatcctcctgtgtactttataggccctaaataatctccagattacctatatggctaaaacaatgcaaatactatgtaaatagctgttatactgtatttttaagtttgtttcttattttatggttttatttgtttatttttttgatctgtggatgtgcaacccacagatagagagggtcaactgggccgggcgcggtggctcacacccgtaatcccagcactttgggaggctggggtgggaggattgcctgaggttaggagctcgagaccagcctggccaatatggtgaaaccgtgtctctactaaaaatacaaaaattagccaggcatggtggcaggtgcctgtaatcctagctactctggaggctgaggcaggacaattgcttgaacctgggagttgaaggttgcagtgagccaagatcctgccatagcactccagcctgggcaacagaatgagactctgtctcaaaaaaaaaaaaaaaaaaaaagaagagagggccaactgtatgtaatttactgaagcatggattcacattatagatggtccctgatttatgatggttcaacttatgatttttatactatgatggtgggaaagctggtgtgatatacgtattcagtagaaattgtacttccaattttgaaatttgatcttttcccaggctagtgatatgcagtgtgacaatttctcatggtgctgggcagaagcattgacccacacctcccagtcagccatgtgatcaggagggtaaatgagtatactccatggtgtactgtgttgccaggtgattctgctcaactgtatgctaatgtgagtgttctgaacacatttaaggtaggctaggctaactatggcattcggtaggtaaagtgtgttaaatgcatttcctacttaaacgatattttcagtttatggtgggtatattggaatatagccccattgtagggcaaggagcatctttatttacccagttgagtttagtggcagcagaactaagttcggtttagctgttcagtgagccaagcctcacttagcatctaattctgtctttattttctgctttagataggccacagctctcctgaagggattaagactttctgtgtgaaaaatggtattcagaaggaagccagcattaattctgtttttatacatttatgaagatttgaaggaatttcactgtcaattctgtcttaattgtattctgtataataaatcataatggtatccaacggctcttgaaaggtttggtttttgtgaacatttctttgaatgtcaaagttgtattagtttgtttctcaattaaactgggtgctctttgagggcagggatttatgggacttgtttgttttgcagttttatatctccagctgctaatgcagtgcctggtttgtagtaggaatgagagatttactccaatagaaccatactaaagatcttacacttatggattacagttgatagctttgtagagtgaactggtattccctttaaatgagacgacatgacctgagtataaagtataatcaactacatgactccagcaagaataccatgtgtccctcagatagcatagctggcagatggagttatgcacatcaactggacatttaagacagctggagatttcttacatttagatgacagtttagattagaaatatttaatcttagctgtacttaatatattatgtagctatatgatacatcatgtatatatggtatatcatatatatcatatatttaatcacatttaatccttagctatattttcatccccaaaatggtatatggatctgtttttattgtcagctggttatttattgttgcttatccatggctcatgaaaatcttcatgttacttgggaaatctttcactctgccttttgaaggacagcccagaaccatttccttcttggcacatgaccttctaacccagtgaccaaagagtatgtaaaagcatggtacacactgcttttgaagattacgtgtgtctattctagatgtgtcttatttcttgcagatatattgcctacaaagattttgatatatatatatacagtagactatactatataattaatatttataccagatattaaatatataagcattctactagaactaaagttaagaatttgaaatagtctcatgtgagtaattaaaataacaatagcatctttttcaagaaagttttttttaatatggtggagataatgacatggaaaaaagtagttaattatttttggtattcccgtatttcatcagtaggttgccatagaacataatagttatataatcaaacagcagaataattttatatgaggtttattgatacagaaatgtttggttcagtgtttgtcttccagttttgcagattttcttttcgattttaaaactggagaatacattaaaaccagaaactttcagcctctataatgccctcaaaactcagcaggttttgaaaatgcctcttccttctcttctcctccccataatcctgcttatttttggcattaagtgagtcaggggttccaaacccaaatacgtttttcaaggctatgtagtcagtgtgaatgagagaagtaaatctgttgggtcctgtgccacactggagtttccaaggctggtctaaatgagttcaacttcagtttttttgtgtttttttagagatggagtcttgctgtgttgcttgagctggtcttgaactcccgggctcaagtgatcttccagccttggcctcccaaggtgctagaattataggcatgagccactgtgctggccaatttttttttttttagcccactgtgctaccagtttgtgatcttcactttaactgtgaaaggactgtcaaagattgtacgtataagatttagtttgagagccaggcctggtggctcatgcctgtaatcccagcactttgggaggctgaggcgggtggatcacgaggtcaggagatcaagaccatcttggctaacacggtgaaaccccgtctctactaaaaatacaaataaattggccaggcgtggtgacgggcgcctgtagtcccagctactcgggaggctgagacaggagaatggggtgaacccgggaggcggagcttgcagtgagcagagatcacgtcactgcactccagcctgggcgacagagcgagactccttcacccaaaaaaaaaaaaaaaaagtagtttgtctttctctttgaaactgaattcattaaacaaaagcctaaataactatactattacttgttatttatttatttatttattttagacagagtcttgatctgtcagcaggctggagtgcagtggtataatcttggctcactgcaacctctgcctcccaggttcaagtgattctcgtgcctcagcctcctgagtagttgggactacaggcatgcgtcaccacacccagctaatttttgtatttttggtagagatggggcttcaccatattggccaggctggtctagaactcctgacctcaagtgatccacccacctcagcctcccaaagtgcataagtgctgggattacaggtgtgagccaccacacccagcctactacatattcttttagacccagctgaaatatcacgtaattgctgaaggctcctgaactcttccagatcagggattgattttcctcattttaagattgtcatgacaactgtagtattgataactgtattttattttattttattttttttgagacagagtgttgctctgtcacccaggctggagtgcaatggcacgatcctggctcactgcaaacttagcctcctgcgttcaagcaattctcgtgcctcagcctcccaagtagctgggattacagatgtgcaccaccaaacacctggaattagtctggctaatttttgaagttttagtggagatggggtttccccatcttggccaggctgttctcgaactcctgcctcaagtgatccacctgccttggccttccaaagtgctgggattacaggtgtgagctaccgcacccggcttattaaccaatttttaatgttcagcacaacttgatcatgatgtacaatgtcttttttatgttatgtgttgatggagtcaaattaccgatattttggttcagttttttcaataagagatcaggctattttctgattttcattctgtttttttctttgatctgtatgtatttataagtgtctcttattttcaaataggttttttctagttatctttttgtaacggatttatagattatacattgtggttaaagaatatggtctataggctgggcacggtggctcacacctgtaatcccagcactttgggaggctgaggcagggggatcacttgaggtcatgagttcaagaccagcctggccaacatggtgaaaccctgtctctactaaaaatacaaaaaaaatttagccgggcatggtggtgggtgcctgtaatcccagctactagggaggctgaggcaggagaatcgcttgaacccgggaggtggaggttgcagtgagccgagatagtgccactgcaatccagcctgtgcaacagagggagactccgtctcaaaaacaaaaacaaaaaacaaacgaaaacacacacacgcaaagaatacggcctacatgcactttcagtcctttggaaattgttggtatttatttgccatttggcctagtttacccagattccacaggttgttaatgttgtacaattgcgtcttctctttctcacttcacccatctatgtaatttttctgaatcatttgagaaataagttgcaaacataatgctgtattacccataaatcagggtgtgtttcctgaaaacaaggatactctcctataaaatcaggaaataaatattgatataatactgccatctgattcacagaccctactcaaatttcactgatcttccaattatgtcttttatagcaaaaacaaaacaacagaaaccaacaaaattccctcaagaaaacaaaagcagaaaaacttccctttccccttcacttatttctgattcagggaccattcaggattatgccttgcgtttagttgtcatgtctgttcagtctcttttaatctagaatagttctcagtctttccttattttcagtgatcctaatatttttgaagagtagagaattattttgtagcaagtcccacaatttgggttagtctgatgtttccttttgaatagatttaggttatgcatttgtggcaggaataccaaagacacgatattatgttcttctcactgcatcgtatcaagaggttcatgtcaatttgtccaattactggttatgtttaattttaccacttggttaagatgttggctggcaagtttttgtaaaattagtttagaggtatttcatacttactggttagtaagtaataatgcattttgtggggtgatgctttgagactatataaatagcttatttctcatcaaatttttgcttgctagttttaccatccattggtgatttgtgcctgaatcagttattatagtggttgctagatggtaaatttaaaaaatttcattatttcttctgaattcatcacttggcatttctttttttttttttttttttttgagacggagtctcgctttgtcacccaggctggagtgcaatggcgtgatctcgtctcactgcaacctctgcctcccaggttcacgtgattctgccacctcaccctcccaagtagctggggttacaggcacccgccatcatgccctactaatttttgtatttttagttgagatggggtttcaccatgttggctaggctggtcttgaactcttgacctcagatgatctgcccaccttggcctcccaaagtgctgggatcacaggcttgagccaccgtgcccagccaatcacttgctatttcactctaaggaaaagctttctctctctggtttttgtctttgtttttgtttgtttaaaaatcttttaaacatatgagcacagcctcattgattcttattttgttcctttttcatgtattttttgatattcaaattgtcccaaatttggccagtgggaaccctttcaggctggctcctgtgtcctttttccatgtcctcatcattctttttttttttttttttttttttgagacagagttttgctcttgttgcccaggctggggtgcaatggcgtgctctttgttcactgcaacctccacctcccaggttcaagcgatcctcctgcctcagccacccaagtagctgggattgtaggcacctgccaccacacctggctaatttttctatttttgtttttattttttttattttttgagacggagtcttgctccgtcgcccaggctggagtgcagtggcgcgatctcggctcactgcaagctccgcctctcgggttcacgccattctcctgtctcagcctccaggcatgcgccaccatgcccggctaatttttttgtatttttagtagagacggggtttcactgtgttagccaggatggtctcgatctcctgaccttgtgatccgcccacctcggcctcccaaagtgctgggattacaggcgtgagccaccgcgcctggcaatttttctatttttagtggagacaggatttcaccatgttggtcaggctggtctcgaactcctgacctcaggtgatccgcccgccttggcttcccaaagtgctgagattataggcatgagccaccacgcctggtcatgtccccatcattctttgatcactttttttcttactttttggaataataagattttctgtgggctgggcgaggtggctcacgcctataatcctagcactctgggaggccgaggctggtgggtcacctgaggtctggagttcgagaccagcctggccaacatagtgaaaccttgtctctactaaaaatataaaaattagccgggcatagtggcacacacctgtagtcccagctgctagggaggctgaggcaggagaattgcttgaacccgggaggcggaggttgcagtgagctgagattgcgccactgcactccagcctggatgacagggcgagactccgtctcaaaaaaaaaaaatttctgggctcatctttacttttgttatctcagtcgtggaatcaataattttatcagggaaccctggttccttttattagtgaatgtacttagaaaataaaatatgtgcactactagatatgttctttctattggggtgttcttccttttaggctctatgtgaggagagaactagaatattgttttaaaatgtaccaggtaatcccagcactttggtaggctgaggcaggcaaggctggcagatcacttgagatcaggagttcgagaccagcttggccaacatgatgaaaccccatctctaccaaaaaacacaaaaagtagccaggcgtggtgacacgcacctatagtcctagctagagtgagatagagtgagaccctgacttaaaaaaataaacaaataaataaaatatactggaatttaatttataggtatgaatgacacagagaggccaatattattgaaaatgtgttactcacagttcttctgaaacagcaggcgcaccatactatgcaggaccacatggggaagcaccagggtgggtcaggaggcagaaggaaccagaggaaaggatgggtgagttttttttttgttaaagtgctagaaagttgttaggtgggacatcccctattgagcagaaagagaaacacaaatgttgagatttgtggttggacggtttgtaatatgatttttgtgtagcctcaaaaacacagagatggtatgaatgtaaacaactttggtcgttaatttggcccatcctttcaagatgccaaatcatcaattacagaatatcaagaatgattatataggtatgtatgcatgtctatacatacatatatacatctgtatcttcctgtaaataatgaaagccatggtttcattccaatactcttaattctagtccaacacaatagggtttcttctggtgtttcccttttctgacattgaaaaatctgaggccaggcacagtggctcttgcctgtaatcccagcactttgggaggccaaggcaggtagatcacttaaggtcagttgctcgagaccagcctggccaacatgatgaaaccccatctctactaaaagtacaaaagttagccaggtgttgtagtagtggtcgcctgtaatctcagctactcgggaggctgaggcaggagaatcgtttgaacccaggaggtgggggctgcagtgagctgagatagcgccactgcactctagcctgggcgacagagtgagactccatctcaaaaacaaaacaaaacaaaacgaaaaatctgcctcctttttttttttcattcattcattaattctttagatggggtcttgccctgtcacccaggcggtagcgcagtgacacgattatagctcactgttgcctcaagccatcctctcgcctcagactcctgagtatctgggaccatacaggcacgtgccactgtgcttggctctcacattgtcctttttactcaccttcctgttggtgacaatctcctgactatgtaggccattttcttgcccccagccccactgaatgagctggctgatcactccttcaagttccatgagccattgttacatacaggtagtactcagtttgcttggttttgatattcataaatttccattgctgtggtttaattaaataatgccagtcctcaaatagcagttaatgaaatacaaaatataacctgtgatcaagaaaagcttctcaggtgggcgtggtggctcatgcctgtaatcccagcactttgggaggccggggcgggtggatcacctgaggtcaggagttcgagaccagcctgaccaacatggtgaaaccccatctctactaaaaatacaaaaaattagctgggcgtggtggcaggtgcctgtaatcccagctactttggaggctgaggcaggagaattgcttgaactcaggaggcataggttgcagtgacccaagatcaagccattgcactccagcctgagcaacaagagcgaaactccatctcaaaaaaaaaaaaaaatagcttctccaaaattttaaaaatttaccctgaccctgaaatagttgattgttccctccctagacatcattcagttggagctagcctaattttgttttttttgttttgttttgttttgagatggagtcttgctctgttgcccaggctagagtgcagtggcgcgatctcggctcactgtgacctctgcctcctggttcaagtgattctcctgcctcagcctccagagtagctgggattacaggcgcgcgacaccacacctcgctaatttttgtatttttggtagagacagggtttcaccatcttggccagactggcctcgaactcctgaccttgtgatccacctgcttcggcctcccaaattgctgggattacaggcatgagccaccgcacccagcctttttttttcccttgaggagaattacagtctgcactgctctcagctgaactttacacagcttttacatttccctctgtcagttcctcttgtaatggtgggtgggtagctgaagggaggatatgtacaataatgtatttttagttcctttgaacagagaggttgcttcagccattgctattgatggcaggaagtatatttatagctccagggaaggaggggtagtacgactgctggtttaagaaaacctgggagattgtatttaatatatgttgttaaaactcatttgtactttattgtaagttcttgccttagaaatgcagctgagatgaatgaacctgttacttatgttatattgttacttatgttatatatgttatatgtattattgtaagtatattgactctgctccctaatttggaaaaatcttccgttttgaaattttacaatatacaatacctaaaacaaagagtacttctagagcatacaggatgtatgtggagaattcaggtgttagcatgcaattgaacagtaaagatactgactagcagtataaatatcgtccccatttagatattttattcataaagttcttgttggtgtagcttttattgtgattttttcttttttttttttggatacagagtctcgctctgtcacccaggctagagtgcagtggcgcagtcttagctcactgcaacctctgcctcccaggttcaagtgattctcctgcctcagcctcccgagaacctgggactacaggtgagcattaccacactggctaatttttatatttttagtagagatggggtttcaccatgttggtcaggctggtctcgagctcctgacctcaggtgatgcacttccctcggcctcccaaagtgcagggattacaggtgtgagccactgcgcctggccaattgtgatttttttaaagattgaaaccaaaatattttatacagatcataagatattcttggtaaacactaagcacctcataactttaccacaattttgattgcacaactttcacctgtggttatcatgtgcaatgggcacattcaacacaaatcaaattattctgaagcttgctttctttcttttttccctactccctttcttaattgaggggagcaaaaagttggtttccagggatatgtcttctctcttatgctggtcccagattgatgcagtcatggaaactaggcagtaaactcattcttggcagctgccggcactggtctgattctttcttttaaaagcatgagattctttaataacacatattggaaagattgatgccaagtgattccaggtcatcctagaggaggcttgggaacattgttgaatagatttaaatgattcagttaagtgagtgatttaacccaaggtttgtgtctaatttaaacaggacctataaaatatagaacaattggtttgtttcttttttagaatattgaagattagattttaatttgagaattttactaatttgagggttttattttttgtttttaagcgttcaaaatgttgaattgtagatatgctgagttttataatgagcacaatgaaggtttttcaactggcccgttaaagccaacccactaatgaaatgaaaatatgaaatattatgactccataatatttcatggattttgaagctgggctgcctgggttcaaatcccatctctgctactttttgggtacgtaaccttgtgccagttacttaacctctctgtgcctcagtttcttcatctgcaaaatgggagatagtgcagtttgagtgttcctaatctgaaatctgaaatgctccaaaatctgaaactttttgaatgcctacatgactgctcaaaggaaatgcttattccatggagcatttggatttcggatttttgggttaagaatgctcaattggtaagtaagtgtaatgcaaatattccaacatctttaaaaacctgaaatccaaaccacgtctggttccaagcattttggataagggatactcaacctgtaaataatgtctgtttcatggggttgtgatgtggagtaagtgagcaaagttgtgtaatgtgcctagcttatagggaacacttagcaaatgttggctattccatttatatataagaaatagaattattggctgggtgtagtggctgatgcctgtaatcatagtgctttgggaggctaaggtgggggattgcttaaggctaggagttcaagaccagcctgggcaacatagcaagactctgactctgcaaaaaaattcacaaattagttgggcgcggtggttatatgcctgtagcccttgctactcaggaggctgaagcaggaggatcgcttgagcccaggaatttgaggctgtggtgagccatgataatgccactacactccagcttgggcaatagagtgagaccccaacttaaaaaaaagaaagaattattgatgggattgtaaaggctgaatattaaataaattcagaggaggtttttacggaacttatttgtgaaatatttttaaaggaaggaaggcatgtttgttttaggtttataagagatggcagatttaggaagctcctccctactccagatgaataagccatctgtttttctatcccttttaaggatttgcttggtgggtttccataacttttttttttttgagactggatcttttacccacccaggctggcgggcagtggcgcaatcatggctcactgcaacttcaatctcctgggctccagcagtcctcccgcctcagtctctcttgagtagctaggaccacagacgcgtgccaccatgcccagccaatttttatttatttttttgtgtgtgtggagatagggtctttctatgatgccccggctggtcttgaactcctgggctcaagtgatcttgctttggccttataaagtgctgggattacagttatgagccatggcgcccagtctatgtattcttacaaaattaaattcatgttaagtgctacactagcagaatttttaaaatttttaaatgatgcacaaatagagaagagagagtgcaaattaacgagaaataggcaagactaatttgaagaaaactatgaagctttactgaaggatttttttaaagatataaaatgctggccaggcgcggtggctcatgcctataatcccagcactttgggaggccgaggtgggcggatcgtgaggtcaggagatcgagaccatcctggccaacatggtgaaactccgtctctactaaaatacaaaaaattagccgggcatggtagcggatgcctgcggtcccagctactcgggaggctgagctggaagaatcacttgaacccaggaggcagagttgcagtgagccgagatcacaccactgcattctagcctggctagagagcaagactccgtctcaaaaaaaaaaaaaaaaaaagaataggcaaataactagagaaaaatagtccagaaacagacctgaatatatataggaatttagaatatgaaagtgtcagtgtgtaggaaggagtgaaatgaaaaaagaaagaaaaaaggaatatgttgaaagtggcattcagaaatcagggagaaaatgatcgattactaagaatgatcctgtaacagtgggctgtttggggaaaaatacgtaaagatttctaatttagactatattcaaataatcaccaaattatatagagcagggatacccaacctccaggccacagaccatcctgttaggaactgggccacacagcaggatatgaactttaggccagggaacattacacctgagctctgcctcctgtcagatcagcagcagcattagattttcataggagcacaaaccctactgcgaactgtacactccagggatctaggttgtgtgctccttatgagaatctaatgcctgatgatctgaggtgttgcagcttcatcccaaaatctgaaaccatatcctccacccctccatttcatagaaaaattgtcttccacaaaactggtccctgggtgccaaaaagattggagaccgctgataatagagtatatataatcaaattacagaaataaccacactctattcttcctctagaatatactgaatgtttcctaagaaaagttgaacactcatggctggttggctgctctctagcacatcttgccttcgtctctcactagttgaattttacacttccaggggtcagtatgtttgttccaaatctgcttatgccagttacatttagtactgtaattttataatttaattaaacattaactaatgaaatatgactgcaaaaagtagttgtttttaggaaaattaagttgtagatcttgaacaaattggataaatacaaatccccttttccccttttcaccaaattactgtcttactaattgtgggcgtgaatattttgaaagattgggggtggaaatcataaaattcttttttttttttttttttttttttgctcttgtttcccaggctagagtgcaatggtgtggtctcagctcaccacaacctctgcctcctgggttcaaatgattctcctgtctcagcctgccgaatagctgggattacaggcatgcgccaccacacctggctacttttttgtatttttagtagagacatagtttctccatgttggtcaggctggtctcgaactcctgacctcaggtgatccacccgcctcggcctcccaaagtgctggtattacaggtgtgagccaccacacctgacctcgtaaaattcttaaacgatctatactcagttgtcttacagttgcctagattcttgttccatttaaagaaactgaaatttgaaatcacaaatgtggattatggatatgatgggttatggatatgatatatttgtaatgaatatgcaagagagaacatttgaaacattaattagtagaaatgtacttaaagaagaggccttggttttttaccgtaatattggcaggtgacatgtatttgttttgagtaaaaatcaaatatttcagttacatttttaaaattacctgatatactgtactttttcatgtaaccagtcagccctgagtcctatttgtgttagataagtttttaccaatcccagaaggagatagaggacaagcttttatatgcttcggctgaagaaaacctttctccaaagaagtaattatctgatcctcctataaagggccagatagtaaatattttagattttgcaggctgaagtagaatcaagggtaatacgtacgttctgatataacaagagagaaaacaaattttgagaaatttcttaattgattaaattcaaaataataaacacaatttattgaaatacaggtatactaatgagaagaatggagttcttttcggagtgataacattttcttaattggagttcagagttagtgcttcctattcaataaataatcatcaaaattgattgcaagtatttatctattaatgcaggtctgtaatgaggttttatatatttcatctttgacatgtcttcacacatacatgtcaaataattgataccagcccataaacatatgattttaattgagcatattaataactcaggaagcatttatagaattaggtttttcttataacatttaccttttagtatattattcattgctgcttaattacttccaatggaaggttagacagaagctccacaattgcactgttaaatagatactgaaatatagatatttccttgtgcattaaggtcctaaaaattattctggaaatgtagtgtgagctaagaaactatatccactgcaaatttgtttgggaatggagatctcacttcttgttttaacttttgatagcatgtaaagtgtataaagcagctcaacgttgcttatgattcaaaagttagttgtctaaataacaacagtttaagtttcatatataagtgttgttctgtcctgtaattttaagttgaatttactattataaaattagcaaaagctaattctcaaagccatttattgtttgatcatagtgtctgaaagcagtcttattgttgtgaaaaatttcaatctcagttccaagctgaaaagaaaaaaaaaaaagcatgataaaactttagtacagctcagccgtcaaactgctgtgtgcctgggcaagtcaggttattcagcttctgtttctgacaatggttaagcccatggcagtgaatgaaattcaccattaacatggttggtttaataattcatgataaattcagatatttttcatagaatatctattgataaaaaacatgaataaccaccttacattttcacgttttataaatcacccaactaagcctttttctgcttcacacatatttttaccattatcaatgataacgtatctgagattccactttaggttatatggaattagtactttttcaccttcttgtttgtagttgttcaacacagactattcatagaagctaattcttcagttgttttaaacttggcactgactccttgaataaacatctgaacagtgttgtaacatctatcaaactcattcaaaagagatggaaatctacttaacctcaattgccttggttttttttttaaacagattattgatcttgctcctaatattttcgacttttagagcaaatgattttgttgaaaggctaatagtctttttttctttttaaattatcttatattaaatttaaaaaataatttttttgttacctgtctggagaaagcctagagaaaggctaattaatactcttaaacaagtttattttctctggatacatttcttcagcttcttcatgatttaattcacttatcactagaatattacttttcttgctttgctaacaaatgagctacttagaaacttccctcctttacaaactttctattccttaccttccctccttgctgtaatgaaatattccactttaaattttcaaatttttctgaccattgctttcctgtgaatcggaaatactgtgatcggtccttagtttggtaacattgatgtattttgaattcttttagcacagacagacagttgactccttgaacaacgcagtttcaaactgcacaggtccaattatatgagaattttttttcaataaatacaatcagcagtttatacatatacaaccaaacgtggatcaaaaatacgttatttgaggaaacccccagatacagaacagtgaaatttttgtatcctctgggccactgtgggacttgagtgtgcatagattttggtatccacggttgatccacagataccaagggatgaccgtagagtcattgcataataaacaaaatgcttccctatcttgtcttgataaaataatgcataccctccactgtgccttaaaagcatgacattcaggctgggtgtggtggctcacacttgtaatcccagcacttttggaggccagggtgggaggattgcttgagcccaggagttcaagaccagccttggcaacatagtgagagtccatctctagttttaaaaaaatacaaaattaaaaaaaatgaaaaacatgacattcaaagtgcatttgtttttgtttcgacatgatggttatgcactaataactaatgatagttatgtactaataaaatgtcaaaataataacgacttttagttactgataacagttatgcattaataaaaaataaaatgtcacagtatgacaatatgcatgtgtggcaccaaacatgctgttgagttataactttgtgactgtgatttgtgggatactgagcagcagtggaaagctatataagccactccactctgccagtcagtacagtggctgattaccaattatggataaccagaacacatcaaaaagcagttcaacaaggatcagaataataacatgtaagtaccatttattaagtagttatgtgtaaggcactgtgtcagactgtataatgtacattatttaaccttcaaaagattgagagggaagatcccttgagtctgggaggtcgaggttgcagttagctgtgattgcaccactgcactctagcctgagtgatggagcgaaatcctgtctcaaaaaacaaaacaaaacaaaacaggcctggtgcggtggctcatgcttgtaaatcccagcactttgggaggctgaggctgaggtcaggagtttgagaccagctgggccaacatggcgaaaccacgtctctactaaaaatacagaaattagttggtgtggtggctcacacctataatcccagctactcgggaggctgaggcaggagaattgcttcaacccaggaggcggaggttgcagtgagccaagatcatgccactgcactccagcctggatgagagtgagactccatctccaaaaaaaaccaaaacaaaacaaacgaaaactacaaaagattgtctgaagccagccacagacaatagtaaatgaatgagtgcagctacattctttcttatttatggatgcagaagtttgaatttcatataatttttccgtttcacttatatataaattatatattatatattacataatatataatatatattataagataatataatatatattagataatatatataatataagataatatatattagataatatatataatataagataatatatattatataatataattaaaatatattaattataatatataatatatgacatatatatgttatatattgttatatataatatgtgtaattatatattataatatatgatatatatataatctatcatatatcatatatataatctatcatatatcatatataatctatcatatatcatatcatatataatatatatcatatcatatataatatatatgatgtatagtatatatgatatataacatatatataatatatgatgtatagtatatatgatatataacatcatatatactatacgtcatatataatatgacgtatagtatatatgatatatgatatatatactatattgtatatgatatataatatgtattgtatattatatataatatatatataaggcacagtggagggtatgcattatatataatatgtattatatattttatatattataatatatattttatatataatatattttgtatattatatattttatatataatatattttgtatattatatattttatatataatatattttgtatattatataatatataaaatgtatattatatataagtaaagtatatattatatataatttttatatatactttttttttttttttttttttagactggatcttgctctgtcacccaggctggaatggagtggctgggactacaggtgtgtgctatcatgcccagctagttttttttttgttttttttttgttttttttaattttttttttttttttaagacggagtctcgctgtcacccaggctggagtgcagtgacatgatctcggctcactgcaagctccgcctcccgggttcacaccattctcctgcctcagcctcccaagtagctgggactacaggcacccaccacacgtccagctaattttttgtatttttagtagagacggggtttcactgtgttagccaggatggtctcgatctccggacctcatgatccacctgccttggcctcccaaagtgctgggatcacaggtgtgagccaccgcacccggcctactttttattttaacttttttttttttttttgtagagatgtggtctcactgtgttgcccaggctggtctcaatctcctggggtcaaacagtgctcctgcctcggcttcccaaaatgttggtattacaggtatgagccactttgcctggctatcttataaataattttgatgttaggaatttttagttgcttttatttttatttttgttgttttaaatatttattaatagaagcaaggggtggataaatcttctagatcaaactcttccttaaaatagttctgcttttggtaggattccagattttcctagttttgttaagtgtttctaatgatgtttggcataggtgttaacttcatgggcctgttgtatacaaaccaatttttttcttgctctgagtgaacagtaacagaacctggtaggtgagtcacactgatactgcattcactgaagttactaagctgaatgataagagatgagaatcctttgcatttgtattcaaatcaagagttgtagaatttgaaattcctgttttgatgaactatgtgaagcatgctgtcattcttctctgctagtctatgttgatgatgtcattaaactagtctttgacttttagttcttggcttaaaatattggaatgattatataataaataggtttatttcatgtggaaaaggaataatgtgtttgccctgaaatagtctgatctgatcaggaggatattatgctgagcatggctggaaataaatttgtagcaccaattaaatacactgtagcagctctgagagggaataaaagtaaaatataaatagtaaatatgagagaaagtgactatgggatctaactatgtaagagcagggtgggagtatgggtagatacgtacatgccccctagattttaggaaagcatatttcaagaagtagagaagacatggatatcaatcagtggaaatcgtatactaaaacggaagtcagtgaaaaaaaaagactgctctcaaactaaagatagatggttgcttctaataggtaggtattcagattcgattaagaaattagaaggccgggcatggggactcaggcctataatcccagtactttgggaggtcatggtgggcagatcacttgagcccaggagttcgagacaagcctgggcaacctggtgaaaccccatctccacaaaaaataccaaaattaattagcagggtgtagaggcacatgtctgtattcccagctactcaggaggctgaagtgagagaatcacttgagcctgggaggttgaggctacagtgagccgagatcacaccattgcactccagcctgggtgacagagtaagaccctatctcaaaaaacaaattttgaaaatatacagaagtatagaaaaactgaagtaatttaatttgtgttaaaatctgtttggtattaaaactaatgtttggccgggcatggtggctcacgcctattaattatcctagcactttgggaggccgaggcaagtggattgcttgagctcaggagttcaagaccagcctgggcaacgtggcgaaactccgtctctacaaaaaatacaaaaattagctgggcatggtggctcacgcccgtagtcccagctcctttgcaggctgaggcaggaggatcacttaagtccaggaggtggaggttgaagtgagctgagatcgcacctctgcactccagcctgggtgacagagtgagaccctgtctcaaaaacagacaacgacaaaaaaccctaatgttttatgaaaaagctctttaatttttcgtgaccaaactgctattctctagacctacactgtccaaaatgatagccattagccatgtgtgctactgtgttggacagcacgtatttagaacatttccaacatcacaaaagttctattgcagaatgctatgaaaatgagatacactttcattagaaaagctagtaaaaataagtaggggtaatggggtactttgactatccagaaattttactaaggaagaattagatttttataatactgggacattagtgtgcactttttttgtcgtaattgcattttgttttttattttgaaataaatacatgtacagaaaaattgcaagaatagttacagagtcttttcgctccctgaaccattagagagtgagccccatcagccccaaatactttaatgagcattaaatctggagtttggccgggcacggtggctcacgcctgtaatcccagcactttaggatgacgaggtgggcagatcatttgaggtcaggagtttgagaccagcttggccaacatgatgaaaacctgtctccactaaaaatacaaaaaaatgagccgagcttggtggtgcacacctgtaatcccagctactcaggaggctgaggcatgagaatcacttgaacctaggaggcggaggttgcagtgagctgagattgtgtcactgcattccagcctgggtgacagagtgagaccctgtctccaaaaataaaataaaataaatctggagtttaataccagtacagtactaccagcttatcttcaggccccattcgagttattctagttgtccccaaaaggtgaaggatccagtttaaaatcacacattgcatttagttgtcatgtctgtctttgacttgatcgccttgacacttttgaagattacaggctcattattttgaggaagtcattaacatggacctgatgtttcttcatctttagattcagattatgcattttatcagaattgccacataaattgtgctgtgttcttattttatccatccaggtactacataatttccatgtgtcccatttttcttgatgttaaccttggtcacttgattaagattgtgtctgccagttttctctaccatacatttaactattttttcctttataatcagtattttatgaggaggaggaggaggtactttgagacaatgtaagtatcccattcctcatcaaactttcaccttctagttttagcacccattgaaatttttttgctggattattggtatgatggctgccaaatgatgattttctaatttcatcatcccttctacatccattcattgacatttcattgaaaggaaaaactgttttcttcccatttatttaacttatatcaatatggacttacggattcatattttattcaataagttatctattagtgtactttggtactttgatgctgagtttgtcccagatttggtcagtggaaaccctgtcaagctggcttctgtatccttttgacattgtcctatcattctttgatcactttcctctttctgggaccagatatgatcaaagcccttcttatacttttcctgccctacctctggaatcatttcaccaaggtaccctggttccctttattgaagaatgtatttagaggttaggtctggacagtagatggcattgttccactgaggtgtcactgctcctagactttctcagcagacagagctagagcatatatgcatgtatatacatacacaaacatacatccacacacatagactcatttttttatttcttgctctgtgtgtgtgtgtgtgtgtgtgtgtgtgtgtgtgtactgtgagttcacactggtacctagtacctcaacacctcagagttcattttatttttcttcctttttgtatttgtaactcccttctctgacagagaaactgggccccagtttttcttaatatattactatttacttaattgatcaatccccttgaatgtgcccagtctttcctttccttatcagatcatgtgcatgctaaccttgctcagccccacctaatggtttttagactgaattatttggagacgaaaaaagtacggttgatgctcattagtcacagattttttttatttgcaaattcacctacttgctaaaatttatgtgtaaccccaaaatctgtactcgtagcacttttatggtcattcatgaacacgtacagaagggtaaaacatttgagtcgctattgggtaacgtgtattcctaggtgaggccaagcaaggcagtctactgccttcttctttgagtcctcatactataaatagttgtcccttttgcagtttacttagcgccacatattttgcattttgacttcttttacttagcatgtgttttcaagttccatccatgtttatagcatgtatcagtacttcattcttcttcttttttttttttaaagagttgggggtctcactgtgttgcaggctggaatacagtggctattcacataggccatcatagcatgctgtagcctcaaactttcactgggctcaagtaatcctcccacctcagcctcccaagtagctgagattagaggtgtgggccactgtaccaggttccttcctttctaaggctgaataatagttcattgtatgtataataccacattttgtttatctattcatccaataatgggcatttaggttatttccaccatttggctatcttttgaaaatcttttcatgtgcttgttggccattagtatatattctttggagaaatgtctcttaaattctttgcctattttttaaattggggggaagttgtctttttttgttactgaattgtaagagttctttattctgataactagacccttatcagatacatgatatctgattaacacatagtttcttgcatcccataggttgtctttcaaaattttgacgaattccaatttgtcagttttgttgcttatgatttttagtgtcatatctaagaatccattttcaaattcagtgtcatgaagatttacctatgttttcttctaagaattttatagttttagaccaagcgcggtggctcatgcctgtaatcctagcactttgagaggctgagacaggcggattgcctgagctcaggatttcaagatcagcctcagcaagatggtgcccatctctactcaaatacaaaaaattagcctatggcgtgtgcctgttcagctactcgggaagttgaggcaggaaaattacttgaaccatggaggcagaggttgcagtgagccgagattgcatcactgcactccagcctgggccacagagcgaaactatgtttccaaaaaaataataacaataattttatagttgtagctttttaagtttttaatccactttgatttttttgttttgttttgttttttgagacagggtcttgctctgtgctgcaggctggagtgcagtagagcagtcttggctcactgcagccttgacctcctgggctcaagctatcctcccacctcagcctcccaagtagttgggatcacaggcttgtgccaccatgcctggctaatttttgtattttttctagagatggggtttcactattattgcctaggctggtcttaaactcctgggctcaagtaatccatgcccaccttggcgtcccaaagtgctgggattacaggcgtgagccaccactttcagtcccaagttaatttttatatatggtatgaggtaaggattcattcttttgcatgtgaatatccagttgtcccagtgccatttgttgaagagcctgttctttccccattgaatgttgtcttagcactctttccaaaaattagttgaccatagggcatggtggctcatgcttataatccaagagctttggaaggcccagatgaaaagattacttaaggccagtatttcatcaccagccagccatggtggtgtgtgcttctgggagggtgaggcagaaagatggcttgagctcgggtgttgaaggctgcagtgagctctgattgtgccactgcactccagcctgggtgacagagtgagacactgtctctaaaaaatagaataataaaaatcagttgactatagatttgtggatttatttctgaactcatttaaaactattccattgatctatatatcactccttataccattaccacacagctttggttaccggtgctttgcaataagttttgaaatcaggaagtatgagttctccaactttgttcttccttttcaagattgttttggccattcggagtcccttgcaattccatataaattttaggatcagtttttttatttcttttttttttttttttgagacagagtctccctctattgcccaggctggagtgcagtggcgtggtcttggctcactgcaacctccatctcccaggttcaagcaattctcctgcctcagcctcccgagtagctgggattacaggcacacaccatccgcccaactaaattttgtatttttagtagagatggggtttcagcatgttggccaggctggtctcgaactcctgacccccaagtgatccgccggcctcggcctcccaaagtgctgggattacagacatgaaagcttttttatttttgaaaaaataaataaataaataaagacataagatgtctttccatttatttagggtctccttgttcttggaggtagattttctctgatctattttcattgagaccttgggccttaagagagccacaatttcatgagagattatttctctggagcccttcctacccttctcctatttcctgtctcctttcctcccttgttattcaaaagtcttaacaaatgctcctgggcccaatacagaggtcagctcacacttccagccttagctttggttcactttttgctttcttgccactggtagttttccctcctctcttaagaacttagctaagcttttcaaaggatgtttgcatttatccaacatttctagattttggtagctggagagttttaataattttctagattgctgttttactagattagaaaaagatagagctgggtgtagtggcacatgcctgtaatcccagctactccagaggctgaagtgggaggattgcttgagcctgggagttagaccaacctgggcaacatagtgagacctatctcaaaaaaaaaagtaagactttagggcgcagtgtaatcccagcacttttggagaccgaggcgggtggatctcgaggtcaggagttcaagacaagcctggccaagattgtgaaaccccgtttctactaaaaatacaaaacttagctgggcagagtggcaggcgcctgtaatcccagctactctggaggctgaagaagagaatcacttgaacccgggtggcagaggtttcagtgagccgagattgcaccactgcactccagcctgggcgatagagtgagactctgtctcaaaaaaaaaaaaaaaaaaaaagacagtgttttttaaagatggagtttagtatacagaaatattgggtgtcaggcaaagtattaattactttgtacgtattctcttttccttcttttttttaaaacgagacagggtgaccaggctaaactctgactgttgggctcaagtgatcctgccttagcctctggagtagctgggcattacaggcacatgccactgtgcccggctacatactcacttataaaactctatttttaaatgacagctcctctttacaaaatagatcaggagagcgattttcctgtctgcttcctgaggaagcaaaaaggcagaaacatggtgagcagcaagaccagtggttgccgtagtaagcatgggacttcctatgaatggctctgttaacagtaggggatggtaatgttctttgatttgtggactctgtttgatttgtggacaaggttttatttcctgtctttggggtaggagggtctgccatatccacaaattggctcttcccatttgttgtattcatttagttagaccatgattggaaagcctcactggctgtgcacattgcaccatacttaggaatatatgacggttatacatttcaaacagggctttaaaaccttccattcagctccttttggataaagctcttttcctcatgtggttgttgacatacatgaattataggctttgtttagctagtgggtaagagcagattttggagtcatgtacacctgggtttgagtttcagtcttgccatgtaccagttgtttgtggacaagttatttattaataactactctgtaccatagtttcttcattggtagtatcttcaaaatgaagtatctatttcctgtgctgttttgaaggtaaccttaaataatgtgcattgtacaatttgatacagtgtctgacacgtagtaaatactttaatatataatacctgtttttattctgatccttgttgagctgctgctttttgatgtgttgattatatataattggtaatcatccattttactgacatcttccaagatttgaccaagttgattgtctcaaatttccaagcagaaaaagtacccagaaaacagaaattaagcagttattaaagaatcgaatagcaatgatcattacgacttgtgcttaataagaaatgtgggccatgtctgcctgagcctttatttaatgcattttaaaatttgctgggttttttcctccctttaaaccttactatcaggttcagtaataagttaaactaaaaagaaacggatgccttagaataaagaaagattcaaattaataggatatataatggcctttcatggtggtggaatttctgtgtgttttgaactaagggaaagacttaaaggaagattgcctacagtgtactggacactttgctaggctctgtggatattatcaagacacagtccttaccctcaaggatctttttatttttcttttagagacgggatcttgccctgccacccaggctggagtgcagtagcaaaatcatagttcactgcaacctccactcactctcaaggatcttactctcagctgggggaggccataaacagttaaagtagcttactctcagctgggggaggccataaacagttaaagagttaatgattgactctagggctaagggaaagaaagtaattgggtcaactaggatttctagcttggcaagggggtagacctggattggcaaactacaacccaatgccagtttttgcatagcccacaaactacaaatgtttcttacatctttgagtggttggaaaaatatcaaaagaagaatactattttgtaacgtggaaattatataaaattaacatttacatgttcataaataaggttttattagaatatagctatgctgaaactacatatctatgactgcttttttgtcacaacagcagagatgagtaattgtgacaaaggctgtttggcctgcagagccaaacatttactgtgtggctctttacagaaaaagtttgctaactcaatgagtaggtggtaatttttatccattgaaacaagcaattaaggaagaacagatacaggagaagataacatttctgtgagtgttgattatttgaatcagaggtacttgtgaatatgcaggtctagaaggcaagggaatttataggtttggagtttggaaagagcttgaggctggaaatggatgtgggaggaaaggaggagatcaagaagactggatggaggagtgcaatttttagccctgtctgcacattggaatcacctgtagtgcttaaaaccaaacaaaaccagacagacatttccaggaacccaaccccaactccctctttcccaagattatgatgcacctgagctggacttgggcaccagaattttttgaaagctcccccagcaactctaatgtgcagccactggtacagagtgagaagattggaagatgggacaccaggaacaccaacatttaagggatagttctaggtgcttctgctgaggagaggaaattctgagggagtgatgatgggaattttagggtggtcagatcctgtaatttgagatcattgttgactgatgaatcaagagcagtttctgtagaggccaggtgagggtgtatgtcagaggcccctggtttgaggtgggagagtatgaactattgagaatattgaccgggaggaaaggggggaaagtgatggctgggatggggggcattgggaatgtagtttgttctagagaggtttttttaagatgttaaagccttgaggctatttatgtgctgagggagtgagtactcagaaagaaagcctggaatggcagtatcagatgccaccattcagttttcatgatggagtgaagggctagattttgaatagttcttggaataatcttaatattgtaacctttttggaactgtttgcttaatgtgctttcttcatttaggtgcattacattgtacctggaaagagaaatggacccaggcattgagaagcaaggccaacaactctgctttgcttgcccggttactgtcgttctgtctgggacattggtctcatctctgaaagcaggagggcaaactgaatgggctctgtagtctcttctaaaagtttttagtttaaactattaatagtacaactttgatttaacaaatgaggaagctgagcttacgagatgtctgtgaagcccattgtctgatcttttatttccttagtacctgggaatgcgcttttttttttttttttttttgaagaacaccaacagttgttcacccttccttgaatttgggtacactgtatatacagagtataccaatttagcctgccattagaacatgtcttcacgagcaaaatctagtataaagtcttactttaatattttctttattatgtataaataatagatggttgttatggaatactggatagtacaaaagtttagaatttttaacattttggtttatttattgggactcttttttccccccagtgattcttgtttctccaacaatgtgaatgcgcactccattcagtgtgaacgtgaatgttaatttatgtgccagctggattctacaggaagcagacacagatggggttggaggggcaaagggcttattagaggagtaatgcctgtgaagaaaaggggaacggaacatgtttgggtatagggagccatcagactgcagtgcacacctgacgaagtctctgcccacccagattgcctgatagaggaataccacaagaggtagaaatggctaggctcttgtactaccactttgcacagtcattgactagagatagatctttgatcaatgtagagattttcagccttggcattgttgacatttgggactggatactttgttatagggggttgtcctgtgatttgtaagatgcttagcagcatcctaggcctctatcccctagatgccagtagcccagcctccctgctattagttgtgacagtcaaaactatctttagacactgccatatgttccctagggaagggcctaatggtatataaacaaccctatggtggcatagtccaagttttgggacagggaggagtgttctatactacccttactggaaagacctatgagctattcagaaatctgaactatttaagatggagctttgttctgtggctcctggaattttaagcacacccctgtgaaacatcttgttaggatatactccactctccaaaacaatccataatgtttaaatagggctgttttattgattgattgattgattgattgagatggagtctcactctgttgcccaggctggagtacactgtcacgatctcggctcactgcaacctccccctcctgggttcaagcaattctcctgcctcagcctcccaagtaactgggattacagacacccaccaccgtgcctggctaatttttgtatttttggtagagacggggtttcaccatgttggccaggctggtctcgaactcctgacttctcaggtgatccgcctgcctcggcctcccaaagtgctgggattataggcatgagccaccgcacctggccttatttttctttttgagatggagtctgactttgtcgcctgagctggagtgcagtggcgcgatctgggctcactgcagcctctgcctcccgggttcaagcaattctacctcagcctcctgaacagctgagattagagatgcgtgccaccatgcccagctaatttttgtatttttagtagatgcaggatttcagcatgttggctaggctggtctcaaactcctgacctcaagtgatccacccacctcggcctcccaaagtgctgggattacaggcatgagccaccgctcctggctattttcttttgagactgggtctcattctgttcccaggctggagtgcagtggcacaatctcagctcactggaaactccaccttctgggctcaagcagtcctcccacctcagcctgctaagtagctgggattataggcatgtgccaccctgcctggctactttttgtggagatgggattttgcatgttgcctaggctgggcttgaattcctaagctagaacaatctgctcagggatgttgtatatttctaaaggtatttttccttttgttgcaggtgacacaactaaaaaaaaacaaaggtatttatggaattccactgagtggtaatggatgatgcagttcaaataactaaggtaagagaaataaaaccagaactgtgaggaggcttttgccagccaagtagtgtccttaaataaagctaacatcacatgctttcctgcttcatttcgtttctaagctgtaagagtagcttatttttttattattataaacattgtaattatcctttaagatacttcttaacctgattatgaatcagaatcacttgaagagctttttttttttaaaaaaaaagaccaaagtcaggctgggcatggtggatcacgcctgtaatcccagcactttgggaggccgaggcgggcagatcacttgaggtcaggagttcaagaccagcctggccaacatggtgaaaccccatctctaccaaaaatacaaaaattagccagatgtggtggcatgtgcctgtaatcccagctactcgggaggctgaagcaggaggatcccttgaacccaggagacagaggttgcagtgagctgagatcgcacactgcattccattctgggcaccaaagaatgaaactccttctcaaaaaaataaaaataaaaagaccaaagttaatgccctgccagcattgaattaaagcttcttgagtagatcacagatgatctccaagttttttaagtgggaatgtaaaccaactctatagttttagaaaactctttggcaatatctgcaaaacatacacgtatctaataacccaggaatttcaattctaggtatccacctttgagaaatgaaaaatatatgtctacacaaaagtgcacatacaaatgttcactgcagctttatgtattatagccagaaaaactgtaacccaatcaggtgtccaaaaacaggagaatagttaaacaaattgtgatatatggtcaggtgtggtggcttacacctgtaatctaagcacttgggaggctaaggcgggcagatcagttgaccagcctggtcaacatggtgaaaccccatctctactaaaattacaaaaatgagctgagtgtggtggctcacgcctgtaatcccagctactcaggaggctaagacaggagaatggcttgaagccaggaggcagaagttgcagtgaggtgagatcacgcccctgcactccatccaatctgggcaacagggcgagactatgtatcaacaacaacaaaaaattgacatacactattgataacatggaattttattcagtaatagaaaggaacaaactaccagtagacatgacaacatggatgaatctcgtagataaaaggttgagtgaaagaaaccagatggacaagaaaaagtagatgtagcagaattaccgagtaaaactaaactacagtgataaaggtcatatccctacttcctctgacaggaggtgggaggttgtgactggaaagaggtatgagagagcctctgcagcaccgaaaaggtgttttgttttgttttttgagactgagtcttgctatgtcaccaggctggagtgcagtggtgtgatctcagctcactgcaacctccgcttcctgggttcaagcaattctcctgcctcagcttcccaagtagctgggattacagacacgcgccaccacgcccagctaatttttgtatttttaatagagacagagtttcaccatgttggccaggatggtctcgattgcccaacctcatgatccgcctgcctctgcctcccaaagtgctgggattacaggcatgagccaccgcgcccggcctgaaaaggttttacatcttaatgtgttcatatacatacttttctcatggtaaaatatatataagattaaatttatcattttaactacttttaaagtatacaattcattggcattaagtacattcctgttgtgcagccatcaccactgtccatctccaaaactttttcatctccccaaactgaaactccatatccattaaacactaactccccatttcctcctcccccagctgctggcaaccattctaccttctgtctctatgaatttgactataatagttacctcgtataagtggaatcatatttgtcatttgacatctggtttgtttcacataggtttatttcacaaaggtatcttgtttatttcacataggatgaccttgttttcaagtcatccatgttgtagcatatatcagaatttacattttatggttgaataatattctgttgtatgtttataccactttatgtgtatccattcattcactgatggacacttgggctgcttccaccttttggctgttgtgactaatggtgctatgaacatgggtgtaggctgagtgtggtggctcacgcctgtaatcccagcactttgggaggccgaggcaggcggatcacttgaggtcaggagttcaagaccagcttggacaacatggcaaaaccccatttctaccaaaaatgcaaaaattagccaggcatggtgctgcatgcctgtaattcccagctacttgggaggctgaggcaggagaatcgcttgaacctaggaggtagaggttgcagtgagcccagatggtgctactgcactccagcctgggtgacagagtgaggctgtctcaattgaaaaaacaaaaacaaaaacaaaaaaaaacacatggatgtacaaacatctgttcgagtccctgcttttagttcttttgagtatattcttagaagtaaaattactggatcatatggtaactccatgtttcattttttgaggaatcaccatgctgtttttcacagtactgcatcattttatattcccaccagcaatgcacaagggcttcaatttctttacattctgctttttggtgacctccataattctaaattatatgtatatgctgtttcttcttaattcttttattaataaaaaagacaacataattctttgcctctccagtgtgaaaaaatgggaatttaccttacactatccccccatttaatatttgtattatttcctgttctgctgctgtttattagtttcctcagacttctgtaacaaaactccatgaactgggtggcttaaacaatagaaatttattgtctcagagttttggaggctagaagtcttgcgggctgtgcgggagaatctgttctatgattttcttctagcttctggtagcctcaggcatcccttacattgtagatggcattctctctgtatcttcagattgtcttccctctatgcatatctgtctcttgtgtccaaatttcctttttcaaaataagtgcgctagtcattggattagggaccaccctaatgagctcatctcaacttgatcatatgcaaaaatcctctttctaaataagttcacattcacaggaactgagtagggggttacaattttaacatcttttaggggacacaattcagtctgggtgacagaacaaatctctgtctcaaaaacaaaacaaaacaaacccataaagtgattacatttctaactttcggaagtactcttcaacctcctttttttaggttaattttcagcactctttccttctttcttcctttcctttttccttttccttttttttttttttttttttttttactttttatttttttgagacagagtcttggtctgtcgctcaggctggagtacagtggtgtgatcttggctcactgcaacctctgcctcctaggctgaagtgattttcctgcctcagcctcccaagtagctgggattacaggcacccgccaccacgcccggctaatttttgtatttttagtagagccaggttttcaccttgttggccaagctggtctcaaacttctggcctcaagtgatccgcccgcctcggcctcccaaagtgctgggattacaggcatatgccaccacacctggctaatttttgtatttttagtagagacagggtttcacctgttggatctcctgacctcatgatcgccctcctcagcctcccaaagtgctgggattacagtcgtgagtgccgcgcccacttaatatttatgttattatagctaagtaaatattgttcactgtcaggccaggcagcattttctgggtttttatttctttctctgtaggttcaatgtcatagaccctgggctattcaaatgagaaaatgaagaaaaagtgaattctctctctgaaactatcagttgcttccaatcatgtctttatattttatatttgaaccgtaactttctcataaaattttctccctggagtttctaattttcttgtctatttgcctgttattatagtttcacttttcaccaagatctcaatcatacactccagcctgtcaaggctagttcaaaccatacactgtggcccaaatttaggctagtcgtacactccaatccgagaccagtgggcactgttttttaggctgtctacacagtcatattggtattttccttactggtttttctttgacgggggtgcaggggaggttgggtccactgatcttggatatcagtctttctttgtatttgttttttaaatcttactagaggctagggggcatggtggctcatgcctgtaaccccagcactttgggaggctgaggcaggtggatcacttgaggccaggagttcaagaccagcctggccaacacggcaaaaccctgtctctactaaaaatacaaaaattagccaggcgtggtggtgggtgcctgtaatcctagctagtcgggaggctgaggcaggagaattgcttgaacccgggtggtggaggttgcagtgagccaagatcataccattgcactgcagcctaggcgacagagtgagactccatctcagtcaatcaatcagtcaatcaatctatcttaccagagttcattctcaagtcacttactgagagaaaaggtacctggcagataaattttgactctttctggtatccgttttttgttgttgttgttgttgttgtttgtttgttttggagacggagtctcgctctgttgcccaggctggagtgcagtggcgcgatcttggctcactgcaagcttcgcctcccaggttcatgccattctcctgcctcagcctcctaagtagctgggactataggcgcctgtcaccacgcctggctaattttttgtatttttagtagagatggagtttcactgtgttagctgatctgccctccttggcctcccaaagtgctgggattacaggcgtgagccaccgtacccagcctctggtgtctgtttttaagaccctcatgttggagtgatggtttggttgactatagaattctaggttgcctattatttttcctcaaaactttgaagtcattgctccatttcttctgacatcccttgttgttcatgagaaatagaaagtttcatataggaaattaatttttcttcttttctggaagcttttatgttctatatagtctggaattccatagaggtgtacttggtgggccccttaatagatctgcagactcatagctctccattttttggttcttttctgtcagcagctttctgatattgagcttcctgggttgttcatataatgttcttatctattctgtcctttttaaaaactctttgcttttggttgttttcctggagattgtcataactttatctcctaatctttttttctctctttttttttttttttttgagacagggtctcaccctgtggcccagactggagttcagtggtgccatcacagctcactgcagcctcgagctcccaggttcaagcaatcctcccacctcagctttccaagtagctggaactataggcatgcgctactacacccagctaattttttttatttttagtagtgacagggtctcactgtgttgccctggctggtctcaaactcctgagctcaagtgatccttctgcctctggggactacaggagtatgccaccacacctggctaatttttgtattttttagtagagacagggtttcaccatgttgccaggctggtcttgaactcctaggctcaagcgatccacctgcctcagcctcccaaagtgctgggattacaggtgtgagccaccacacctggcctgctgttttttcttttactgtttcttaaactagtcttctccccgctttcttttcctgtatgaacgttaatagttgaccacagcattggccctgtaatactcttttgttctttgtatttcttcagttttatttagcctctgttgtgtgttcacacattcctttttatttgcttgatgtgtgtcccatcccttcttttgaacactgtgtggtcattaatgagagtgtggtaggattttatgtactgatatttaagaaaatgaccataaaatgttcttggagatggtctttaaagaccgggcatggtagctcatgtttgtaatcttagtactttgggtggctgaggcaggaggattgcttgagctcaggagtttgagaccagcctgggaaacatggggagatcccatctctacaaaaaatgcacaaattacccaggcgtggtagtacatgcccgtggtcccagctattccagagcctgaagtgggaggattgcttgagcccaggagctcgaggctgcagtaagccatgtttgcaccactgcactccagcctgagtaacagaacaagaccctgtctcaaagaaaggaaaaaaaaattttaagtagttgattaaaagaggtctttagggtgggctctaatttgatgtgactggtgtccttgtaagaaaaggaaatttgtacacgcagacatcagaaacaaatacacagaggaatgaccaggtgaggatacagtaagatggtggccatctgcaggccaaggagagaggtctcataggaaaccaaacttgctgacactttcatcttggacttctagcctgtacagctgtgagaaaataaatttctgttgttgaacccaccgagtctgtgatacttttatggcagccctaccaaatgaatatagacatttaagaaggcttggtgcattgcagcatttggtaaattattatgcatttcgttgtattgtgcatgtagtgccattactgagaatagcaggatggatgggaagcatcgagacaaagtaaaatacgagctggccactaacatatggtatgattttgtggtaggtgaaaaaaggattccagaagtagagtgcttatgaaagaaaagctcagtagtgtaagaattttacaccagtttgactttaacagagagtgagttcaacagtgaaagatgaggttgcaaatgtagtttggggacccatattaatttcctggtgctgcccaaacaaagtaccataaactcggtggctaaagacagcagaaatatattgtctggcagttctggaggcccaaagtcaaggtgttggcagtgttggttccttcttggggggaatctgtcccatgcatctctccttagcttccaagagccccctgtgttatttggattgtaaatgatcactcaaatcctctttcttcaattggcattttccctgtctgttttcacatgattatcttcttataaggacaccagtcatattggattaggggcccacagtactccagaatgacctcatctttatttaactaattacatcttcaacgaccctatttccaaataaggtcacatcctatggtactggggattaggacttcatatcttttttggggaggcatagttcaacccataacaggggccaaactgtgaagcatttcctatatatcaatccagatattttcaaatctattgtttattcagtgggaaaccattgaaaactttgagcaggatgaatctaacactttaggaagactccttggggatggggttggagagatgttagctgcactggaagtcagtagaccagagtctggaccactgggagtctggaccagatcaatgttatggaaaaccaggattctggggctcccactcaagatatcccaaacccaaatcttcagactggagacccaggactgttttttaaaagctccctctctctccctgtgagtcagatgatttagcctagcttggatgtaacactgggtgtgaggtgatagaggcatgaaatgggttggtggttatgcaagtagaaagaccagagagaacctgggaaaagagacatttcgaaaaagtagtatgtaaactggcaccggagagtctgagacagtggtggaatccttaacagaaataaagatgtctagagaataaattgggtttaaagggaaggtaattaatttggtttacagtgtaaggtgatagacagtcagcaggcacttggagaatggtgatgtatgttcagaagtgagataatggaggtgataatcaaaaccctttgttttgatttgagcctttgtgtgggagaaaggatatggcgagaagaacagaagatcaggaagccaatactgtagaccctcattccctagcccctgaaacaaatggatttgacttctctgtcatgacacctggaacaaatgtggcattgcttacttacttcctttgccatgaactcagtgaaggcagggacgggtcttggcttgtgtgtgtgtgtgtgtgtgtgtgtgtgtaagagactgggtctcattctgttacccaggcatgagtgccatggcataatcatagctcactgcagcctcaaacgaacctcctccctcaggcctcctgagttgctgggactacaggcatgcaccaatggccctggctttttaaaggccatcatctagcacagtgcctggcttttcaatggaagtctgttgaatgactgactgactgaccgacttggaaaatgaacacatcaacttgagaataagaactttaacttttttcttccttgcatcccctaacatttaatccaatgcctggtccttaataggacccaaataaaattttgatgtgtgaatggtagaagaaaagctaaaattgagtagtcattgtgtcaaagagaaccaggaaacagagaagcttttgagaataagttgaccataacatgtcaaatgcaagtcaaggagaatgaaaactgagggcaggaattagatttaatcaggaggttatttgtagatttgagaacgaaggatttaagaacataatgaggttgttaagggagaatgaaggaattaagatcataatgaggttgttaagtagaggtggaaagtgaggaaatgaaagccaagtacatcttatacaagtttagtagtaatgaggaaaagagaagctcatagagttaaagctctaaaaatctgtttagaacatccgtgtctatttgtaaacaaaggggtatgagggttagggatggaaaaatggaaagtaccagaaggaaatgcataattttaggggaaagatctcaaatgggatcaagaacatgggcagtagccttaaaaaggatgagggaatctcttcctctagtctaaaaagggagaatagaggctctatagaggagagagaggtcatgtcctcttgtcagccatctgctcagagggagcttgggctgctgtgctagaaactgacataggaaactgacaaaggaaggatatgttttctgcacagcactgaggagtgtgatactcctaagcagtagttggcagcctgagataggaatggtggaaccagatggtaagtataatccaggaatcaggatggcactttctgtagattagggagttgtaggctgggggtgtacttttattcactcttctctgattcagaggttttataattttcactaacatcattaaaaacaatattggatgcctactacctgttggtttttattttaatcttgggaaaaaaaagtaaaagctactatcctgaggtttctggttttattggggagatagatcatatatgtaaaaagcaagtttagcaaatggcacatggcattatagactaagtcccaaatcagtagattacataaatgtcagagagattacaattatagcagtacactttgaggttcttttccccttagcttatgaacatttaaattttgtcacttttataaatacatgcctatttgagaggtaagaaaagtaccatgttgctttaatttgcttttctttgttagcaaagatgaattttttcagttgtttatcattattttactttttatgaattgcctattcatagcttttatccatctttccatggttgtgtttgtacttactaatttgtaaatacctcatttaataaggttatttaaccttttgcctgtaacattttgcaaatgttttttctagcttgttttttggggttctttcttttggttggttggttggttggttggttggttgggttttttttttgagacagatcatcactctgttacccaggctggaatgcagtggtgccatctctgctcactgcaacctccaccttctggggtcaaatgattcttgtgtctcagcctcccaagtagctgggattacaggcgcacgccaccacgcccagctaatttttataatttttgtagagatggggtttcacgatgttggctagggtggtctcaaaactcctgacctcaagtgatttgcctccctcagcctcccaaagtgctgggattacagatgcagccaccatggccagccttttctagtttttttaatttaaacattttctttcagatttcttattttgatttattttcagtttatgatgttttgttgacacataagagtttaaatatcttatgtattagaaactattaaatatttctttttaatatttaggaaggctacctcagcctgagaacagacaaatattttcaaatgttttcttcaaattgttttatagtttattggtacttatttacattccattgtattattgttatttatatacttaaaactttaaaccattttggaatattgcatgaaatagagacctaatttttgctgagtagttcagcagtttctagtactgtttactaaataatctatgaaaattttctgcggattcctaaatgattttgtccaggctggagtacagtggcacaatcatggctcactgcggcatctacctccccaggctcaggtgattgtcccacctcagcctctcaagtagctgggactacagaagtgccactacacccagctaatttttgcatttttttgtagagactatatttcaccatgttgctgagcctggtcttgaactcctgggctcaagcgacctgcccacttcggcctcccaaagtactaggattacaaggcatgagccaccgggtattttttatcatattcccaatacttatgtatacagacttccttgtttataaatctgtatctgtaccattgccacatattattgtattaatataatctcatagtgcaaatacttgttcattatttgttttaaataatgcctagactacactcacctatttgtatatgtgaactttttttaaaacattttattttttaataatttaagactcagaaagctgcagtagtacaggttcccaggtatgcttcacccaagggctttcaattagaacctttttttttttttttttttttgagatggagtctcgctctgtcaccaggctggagtgcagtggcgccatctcagcacactgcaacctctgactccctgattcgagcaattctcctgtctcagcctcccgagtagctggaattacaggcatacgccaccacacccagctaatttttgtatttttagtcaagacggtgtttcgccatgttggtcaggctgatctcaaactcctgacctcaggtgatctgcttgccttagcctcccaaagtgctgggattagagtggtgagccactgtgcccggcccctgaaatcaccttttctgtaatgctactttgttcaataaaaataacatattaatatcctttttaaaaatacatacaatatattgttattaactgtagtcaccatgatgtacaatagatctcttgaacttattcctcctaactgaattttgtgtcctttgttcagtatttccccaattcccctacccaccaacctctagtaaccaccattttactctctatttctatgaattcaactttttacattccacgtgtaagtgagatcatgtgatatttgtctttctatgtctggcttatttcgtttaacataatgtcctccaggtttatccatgttatcacaaatgacagaatttattctttttttaaggctgaatagtgttccattgtgtatgtatgccacattttctttcaccattcatccatcaatgaatgaaaacacttaggttgatttcatatcttagctattgtgaataatgctgcaatgaacatagtagtacagatatctcttcaacatacccatattagttatatcctttagatatatatccaatagggggaattactgaatcatatagtagttctatttaaatttttttttgttttttaattttgtttgtttagagacagggtctcgctgtgtctccaaggctgtagcacagttctgcaatcataactcactgtaagctcaagtgatctacttcagcttcgctactacaggcacatgccactatagtcagctaatttttaaaaattgtttgtagagtccaggtgtggtggctcacgcctgtaatcccagcaatttgggaggcctaggcgggtggatcacctgaagtcaggagtttgacactagcctgactgccatggtaaaaccccatctctactaaaaatacaaaaaaattagccgggcgtggctgtgcatgcctatgatcccagctacttgggaggctgagaggcaggagaatcacttgaacccgggaggcagaggttgcagtaagccaagatctcgccattgcactccagcctgggcgacaagagtgaaaatccaactcaaaaaaaaaaaaaatcgtttgtagagacagggtctcacaatattgaccagtctggtctcaaactcctggcttcaggcagtcttcctgtcttggcctcccaaagtgctgacattatagccatgagcccctgcacccagccttatttttaattttttgaggaacctccatacatgttttccataatggctgtacttatttaccttctcaccttattgtataatggtgcatatctcagaatgtgtccttactgagtgacacataactatatttgaagtaagtttcttatagatagcatatagttgggtcttttcttttctttttttaatagagacagggtcttgctatgttgcccaggctggttttgaactcctgggctcaagcagtatgcctgcctgggcctcccaaagtgttggtattataggcatgagccaccatgcctggcctaggtcttttttttttgagacagggtctcacttttgtcacccaagctggagtgccgtggtgcaatcatggctcactgcagcctcaacctcctaggctcaatcagccctccacctcagcctcctgagtagctgggattacagatgcatgccatcatgcctggctaatttttgttttgtttggggtttttttggtagagacagggttttgccatgttgcccaggctggtctcgaagtcttgggctgaagtgatccacctaccttggtctcccaaagtgctgggattacaagcgtaaaccattacacgtggtctagttgggttcttttttaaaagaatcagttctactaatttcttttcgttggtatgtataaaccatttatatttaatataattattgatactttggatttaaatttgccatttttgtttcattcattatttttgttcttctgtttcccctttcctgttttacagtgggttccttgaacattttttaatatttcattttgagtgtatctctttataaagttttttgtgtgattgctctaggaatatatatgtagataacttattacagtctattaatatcaactttttaccaccttaagtagaatgtagttagttttagtagaaggaatcttttagttccttctacctttcttcttctttttttttttttttgagacggagtcttgctctgtcatcaggttggagtgcagtggcgtgatctcagctcattgcaatctccacctcccgggttcaagccattctcctgcctcagcccctccgagtagctgggattacaggtgcatgccaccacacccagctaatttttgtatttttagtagagatgaggtttcaccatgttggccaggatggtctcgatttcctgacctcgtgatctgccggcctcagcctcccaaagtgctgggattacaggcatgagccattgtgcctggcacaccttccttctttatggtacagttgtcttaaatattacctctacatacaaggagaaccacttcagggactgctataatttttactttcaaccatcaaacataatctttaaaactcaagagaagaattgcttaattagtgtatgtatgtgtgtctgtatatgaataaacatatatatatgcataacatatatatggatatatgcatatatagacacacacacaccctttccattgctttttctttacttctatttgaggttttcttctgttatcatttacttcctttctgatagagtttctttagccattcttttcaaagctgatctgttggtgacacatttttagttttgttcatctgccagtatttgtatttcatttttatttctgaaggatattttcactgtctatagaattttagcttgatagttattttctttcagcatttgaaaaatattgtatccatccttgtggtttccatggttcctgatgaaaaatctgttgtctttcaaattgttattctcctatgagtgatatgttgtttctctctaattgatttcaggacttttctttagtttttagaagtttgattctgtaagtttatatctaaatctgaggctgagtgtggtggctcatgcccataatcccaacactttgagaggccaaggtaagaggatttcgtgagtccaggagtttgagaccagcctggacaacatagtgagaccccacctctaaaacagatagatagatagttgattttgtttttgttttttcctttttttgagacggagtcttgctgtgtcacccaggctggagggcagtggctcgatcttggttcactacaacctccgcctcctgggttcaagcaattctcctgcgtcagccacccaagtagctgggattacaggcacccgccaccacacccaactcattttttgtatttttagtacagatggggtttcaccatgttggccaagctggtctcgaactcctgacctcaggtgatccccctgcctcagcctcccaaaatgctgggattacagatgcgagccaccgtacccagtagacagtttttagccattatttcttaaatttttttttttcatctctccattcattctcttactcttgggaccctgatagcatgaatgttagatctttgttattatcccacaggactttgaaactgtgttcatttcttttcaatctactttctctcttgtacagactggatgatttccattcatttaagtttactaattgtttcctttatcatttttcttttgctgttgagcccatccagtgggtctttttaatttcagaaattttatttttaaaaattccatttggtactccttatgtcttctatatgctgagtgtttataatgtcttgtttgagcagtttcatgagcgctgttttaaattcttttcaaataattccaaaatctatattatcttggtattgtcatctgttgattgccttttttcattcaagttgagattttcatgttcctggtataatgagtaatgttggattgcatcctagcacttggaatattgtgctatgagattctggttcctgtttaaatttttatatttaacagtcaacctgtttaggtttagaacacataccctgtcccacttttgtcgactgtggttcagttttcagtcttgttttactcttatggtctgtgctaccgaaaggccagtctgaaatttaggtgttattccggagcagtgttcagttcttatgccttttgctgtgttgtttctggtcatttttacacatgggttgctcagaggcacttttaggatttcatacacagattcagagaattcatttctctagctctctcctcaccataatcctttcccaattctgtagttttgctgggattaggactccatctggttattccagggtagagaaagatgagttcacccacattctctgcagctgtaacatggagaagaggggaaaggcgtgccacctcattatggcagagttgtgttggaaggcagaatgctgttcacaatttctgggccacagtgtctggtgaggaaaaggaggggtacctcctccccttttttagtttgcctggtcaaaatgtttttgtctgctgagctgcccctttcccagttctttacctagagagggcaggcttttcttggcactttcttgtctgtgcttactggatctttcagattgtggcttcagagcttgggctaggacatattagaagttaaaccaaaccaaacaaaaaagtagggagcttcctgttgggtcagtcctcatgtcccctggtccctagccaatctaccttcttttttctacttttcagaatttttctgtcacttgtgtcatgaatttcatctagaatgttcggttataatcggtgggaagggctgggcgcggtggctgacgcctacaatcccagcactttgggaggccaaggcgagcggatcacctgaggtgaggagttcgagaccagcctggccaacatggtgaaaccccgtctctactaaaaatacaaaaaaaattagccgggcatggtgggggacgcctgtaatcccagctacttgggaggctcagataggagaatcgtttgaacccaggaggtggaggttgcagtgagctgagatcgcgccactgcgctccagcctgggcaagaagagcaaaactccatctcaaacaaaaacaaaaacaaaaacaaatcagtgggaggaatagggtggaatatgcttactccatcttttcctgaactgtaaatccctgctgcaattttaaattatgaactttagttccagtagttttttttaacctatgtacgtagtctttcaaatacaaataacagttaaggggttttcccccaataattatatcttgttttcttttcttttcttttttttttttttaaagagaccgggtctcgctgtatcgcctaggctggacttgaactcctgtgctcaggcaatcctcctccctcagccttccaagtatctgggactacaggcatatacccccatacctagctgttttcttatcccattatctacttttagaacaaggattggcaaactataatctgtttcccatatccagctcactgcttattttggtatggcagacaagctcagaataggttttccttttttttggagacaggtctcactttgtcactgaggctggagtgcattggtgtaaacacagctcacttcagcctcgacctcccaggctcatgggatcctcctgtctcagagagaaaaagagagagagaaaaaaagaaattatatgaaattcaaatttcagcgttttattagaatatgccatgttcatttgtttatatattgtctgtggctgccttcatggtacgacagcagagttgagtagttgaagcagagacttaattgccagccctttttccagatgatttgtaaatcctagaagtgaaaccattgtccctttcttgtcctgctttagtgatactgatatttcaagatacataattttcttgggtgaaagtttcttttgtttctggtttctaggtatttgtgagatatttctctcacaaaacgtgttcttttcttctggtttttttttgggggttttttttgtttctttggttttttgagacagtctcgctctgtcacccaggctggagttcagtggcgcgatctcaactcactgcaacctctgcctcctgggttcaagcagttctcctgcctcggcctccctagtagctgggattacaggtgcctgcaatcacgccaggctaatttttgtatttttagtagagatggggtttcaccatgttggccaggctggtcttgaactcctgacctcaggtgatctgccctccttggcctcccaaagtgctgggattacaggcatgagccactacgccttgtctcttttcctctgttatctgacttactggatggcatctgttaggtaaatcagaaaccaaagaggagtagcattcagcactccctgtcaccccaagagcaaatctattatcacaccctgtgcagtttacttcctgaatatctccttccttgtaacacttttgtgtctccaccagtaacttctaactggactgtccacatccagtgctatattctctacacccagctaaatgaagtgttcattccaaaatgcagggcagggaggtcactgtcatgcttctgttcttcaaaggcttcttaatgcttatgggacaaagaaaaatcacccttgtgtggccctaccctgtatacatctccagcttcctggcacctgctcccccttactctttatacttcagacacggtggcttctttcagaccctgctcctgccctttctgaggttacggactggcatggagttccctgccctccttaatgcctccctgattcctgttcatcttctacttgtcagctcaggaatcagtgccttagggaggccttggctgagctccctgactaggtcaaattttcttcttctataggctcttagagtcctataattctcttttccatcacttctcctatttgtctgtgaggtgatttgtttaatgtcagttttctgctactagactgtaagcttcatgaagatagggattctgttagaatttgttcactatttctagtagaaggaacagggcctagcacatagtaaatactgagtaagcgggttatttccccaatgattgcctttttaaagaaaaccagttctgtaaaccagcattcatcaggcttatcatatggctttttatattttgaattatttttgtgaggatttttattaatatgttttccaataatggaccatggttaaatttttgaagtaagccttacttgatcaggttgtggtataattataacatatgctgctttttctttgctaggattttaagattttgcagttaaagttattttcttttttgtgtgctttgtcagattttgacatcagtgttatactagtattttcatggcttattttattccattcttttattttcaacttttctatatccttaagcttaaaaatgtctcttttaaacagcatataattgagggcttttattattaggctttataatttttgtattttaattggaacatttagtttgtttaatatagttaatatattctttgctttctattttcctcaaagatttgaatagaacaaaaggctgacctcccccaagcaagagggaattctctggcagtctgcctttgcacttgaaatgcaactcctccctgaatctccagcctgccagcctcttctattatgagtcaattccttaaaataattctatatgatatatatttaatataattaatatataatgtggctactacctagtagaattaatgtatacttaatatgacatataatataattacagtagtaccttcttatctgggggaagcattatattccaagacccccagtggatgcctaaaaccacagatatatattttcctatacatacatagctgtgataaagtttaatttataaattaggcacagtaaaaaattaacaataactaataataaaatacaatacttataataatatgccagcatgttcctttttctcttttttcttgctttttggattgatagacttttttactatcctagcttttttccctcttgccaagttatagaccctgttcttttagtggttaccctacagattacaacacatagcctgcatgtataggaatgaaatacagtttacgtagggttcagtaccatctgtggtttcaggcatctactgggagtcttggaacatatccccccaccccccccccagataagggggtagtactgaaattatattaaatatatgcttattatattaaatattagtcatatattacatacatattatatagatttattttaagggattgattcacagtgggggaggctagcaggctggagacccaggaaggaactgcacttcaagttcaagggtagtctgctggagaattccctcttgcgtggggaaggtcagccttttgtgctattcagaccttcagttgtatggatgaagcccacctacattatggagggcaaccttctgtactcaagagtccattgatttaaatgtaaatctcatccaaaaaaacccctcacagaaatatccagaataacctttaaccaaatatctggacactgtggtgtggcccaaccaaattaacaatcacaagtctactctttatcaacttggcacccatacacatctccttaaaccattattaatctccaaataaagacagtaacaaagtcatacttctgcttagcatgaaagaactatcttgcatgtagccgaaaacacactattcctttctctaaaagaggatgcagattatttggttgatgtttactcttcttgatatcctgcaacttaaattctaaagtttaagaaaaagttaatacttaagtattatgatcagctgttaatctaattttttttgacgaaaatattttcgtatccattttctattgctgcctagcaaaacatccccaaatttaatattttaaagcaacaaccatcaaaaattggctcacaattctgtgaatatcaatcaatgctgggtagctgtttggttcctctactggtcttttttttttttttttttttagacagggtctcactctgccacccaggctggagtgcagtggcatgatctcggctcactgtaacctccgcctcccaggctcaagcaattgtcctgtctcaaccttctgagtagctgggattacagacacacaccactaccacctggctaatttttttatttttagtagatatagggtttcaccatgttggccaggctggtctcgaactcctcacctcaaatgatccacctgcctcggcctcccaaagtgctgggattacaggcgtgagccaccatgcctggcccctctgctggtcttgattgaagtcattcatgcaactgtaatcatctaatggttcatctgggactgagattgtctcaagcacatgtctggcagttggtgtcacttgttgattgggcctctctcttaacgtaaggaagtgagccaaagcttctcacattatgacagcagtgttcccatagagccaaatgacagctgtaagttctcttgaggtatcaacttggaagacacaccattacttctgcattttattggtttaagcaagtcacagggccaactcaaattaaaggaatggagaaataaacttcacctgttgataggagtggcagtgtctcactgtaaaaggcatgtgtacaaggatgggattttacgtagccatctttgcaaacagtctaccacagtgtcttttttcctttcgagtgcttaaaaaaattgtttttaaataattatttggttttcagaaatttcactattgtgtatctagacacagatttcctttttatttatctgtttggggggtgtttagggcttcttggatctgtggtttgatgtttttcctcagttttggagaattttcagccttcgtctgttcttcgaatatttcttctgttccatttctccctttccgcttttctgaaactgaaattacatgtaggttagatcatttcattgtatcctttatacctcttaccttctctttggtatttttttataaatctttttgcttctctctgcttcattctagatacttccttttgacctatttaccagctcactaattctctcttcaggtatattttacctgttcttaaatttatccattaagatctttttttcagatctgctattacatttttataccattcttgactaaaattcttaatgctacaggactgttcttcttgtctgtttcttactgattctcatgttgcctttttatggactagacactgtagttttaaaattatttatagaaatgacctgagacctatgatatatttttcaagagaggatttacgtttgtttctagctttgcctaggagtcttcaatcattttaattcagtttcagggactgatttgcttttaagcagggctgtagtccctacaggggtggtcaacttcatttcactacctaatatacctattatgtgtggagtactttgctagatgttgggtaggtcttgtgagcagagcagacctctctttggtctgtatggagcacggagcttgattataattggcaggtgtgtgtgtgtgtgtgtgtgtgtgtgtgtaaataaataaatatttatttatttatttattataggccgggtacagtggcttacacctgtaatcccagcactttatgaagtcaaggcaggtggatcacttgaggtcaggagtttgaggccagccttgccaacatggtgaaaccctgtctcttctgaaaatacaaaaattagccagacgtggtggcaggtgcctgtaatcccagctactcgagaggctgcggcatgacagtcactcaagcccgggaggtagaggttgcagtgagctgagattgtgccactgtaatccagcctgggtgacagagtgagactccatctcaatatatatatgcgtgtgtgtatatatatatatctatatctttaagatagatatatttatatagctaagtaattaataaatatattaagttctatgaaagcaatgagtaggctgctatggttgtgaatatttggactacacaggggataagaatgggtctaccataattagcagggacaggttttgtttaagccaaaaactaagagggcttagaacagaaaccgccaggcagaagcagttaccagtgtgaagactagatgacaaccaaaaaagtatgtgggaggagggaggggaggttgcgcagtggggagttgagattgacttagaactgtattaatgagctttccccccaacccccatttttctcccatttaccttcagaaaaattagtgatttggctaccagtgaatctaggctccaggtgtagctctgtagttttggactagttacctaattcttcattcacaacaaaacagaaggagagaggaaaaagagagcaaacatggaattgggatgggaagtaagagagcacatgaggagagagactatgtcaagtttcttcgtattccttttttaattacagaagaaaagatgggataaaaatattccatcttatttctctgtttaaaagaaagagtaggccgggcatggtggctcacacctgtaatcccagcactttgggaggctgaggcaggcggatcacaaggtcaggagtttgacaccagcctgaccaacatggtgaaaccccatctctactaaaattacaaaaattagccgggcgtggtggcgcatgcctgtaatcccagctacttgggaggctgaggcaggagaatcgcttgaacccgggaggcagaggttgcagtgagccgagatcacgccactgcactccagcctgggcaacagagcgagactccttctcagaaaaaaaaaaaataataataataaaataaataaaagaaagagtaaatgaatcaaaatgaagagaagccattttatctgcctcctggatgaagagtttcattgatgaacctgaaatgttttggttaacatgagaaaggagggtgagaagatgcctgagatgtgagctccttgaggacaggagctgctttctctctccagcctggcacaagacaaggaacttagttgaatgaatgagcaaataagtggttctctgctttgaaggaacttggactgtcattaccttgcaaatcaggtttaccatttatttgctttatataagttccagaaagaaactatttcctctcataatattactaccctaaacttctggtctgatctatggattgtagagcttaaatttcctcaaaccccaacagtcagagattgttacaccaagataaatagcatatttctcagcgccttgtattttctgtctttggccacagaccttaggacttaggctgatatttgagaaggaaaaactggaatttagtagaattatacttcctgtatcttaattttccaactcttatataaggtttgctttttctagagagagactaatctggaatgagaatgaattctcatcagtaaaggcaaagctttaagtgggtcatctgactttgcttttgtgctctacattcaccctgctcataaaaggtcctttcatgagttttctaggctttcatcactgccagcgtctccacaggcattgtgaaagtattaaacttcctaccctcccccatgcttgtctcatggactctttcgtagagtgcacagtggactgtgtttagctcagcaggaactctttgcaaacactgaatacatgaacaacccccctggaaagataagagatttcagtattgcttggtgtcatagccgcagaagttagtgtctgccagtatctgatgaatatggtgacttgcagcctaatttttgtgaaattatgaggccaaagtttaagaagtgttcatgttaaagttacttatatataaaatttgcctatcgataatttctgtcaataggaggttgatgaatgcttcacataacctagatactcctaattaactgttttttatttctttttttctaggacacatgttcaaagagcataattaactttttaaaagaagctagtaagtactgaaatagttttttaagttttttctacaagaatagaggaagaaaggaaacatggaattctgaagggctacttagcaagctgcttatggcataatctggggtgggggtgcatagtaaaggatttgcattttactgagaccgatacatgtcaagggaatggtatttaaaattagtgatatgtgttgatttttcaaggactatagcccatcaactacaataggctccaaaaaattctggtgaaattagcttcttggagccttccagtttacctactatgttattcccactataaaatattctcaacttttggggttttagccacttaagttttttattttctctaatgtctctagtatctgctttagtttcctgtcaatgctagactctgtggttcagcagttcatccattctcttcccagtactcaacctcgttgcttatagtttcattacattcatctagcaaaaccttaattctgtatgtttgccataccattagtgcttagagcattttttcagaaaagaatcctggaaaaatggatcttatctcacctgggccctcaggactgctgggctgcctggtgtcagcacttcccgccattttctatagcaccagtattattcttaatactttaaaaaaccaccaggcacggtggctcacgcctggaatcccagcactttgggaggccaaggtgggcggatcacaaggtcaggagatcaagaccatcctggctaacacagtgaaaccctgtctgtactaaaaatagaaaaaaattagctgggcgtggtggcgggcacctgtagtcccagctgctggggaggctgaggcaggagaatggcgtgaacccgggaggcggagcttgcagtgagccgagattgcaccactgcactccagcctgggtgacagagcgagactccgtctcaaaaaaaaaaagtaaataaaaataaaaaaccatatcccactatctcccccttctctctttgcctgtgatcttgctgcatacttatggggaaatctttaagatgtcagatttcagttctctcacttttctacaacttctcccacttttgcctttcttatgtaccttcccttccttcccatctgattccttatcagtatttacacatgattagttcttgcctaacctaatagaccctttcttgagtgcaaatcagtggctatttttgctagggtataaaaattacctatctaatcaccttgacaaagttaccctgttatttccaataacttacttcctatggattcttgtagattttcttttttttttttttaatttttttattttcagatgttttctcgctttgtcaccatgcctggcctaaattctcgtaggttttctatgtaaacaatcagattttctgcaagtattagtctcctttctaattgttataattttaatttctttttctttttaaaatttttcgtagagacaaggttttgctatgttgtccagcctggtcttgaactcctgggctcaagcaatcctcccatctcagcctcccaaagtgccattacagtggcatgagccactgtgcctggccaaatttcttttcttgttgcgaaggcagacttttcatacaatactgaatagaagtgatagtagattactttatttctgattttcaaaggaatgctttccgtttctctctgttgaagataattgcgtattgtttttttttttaaatagtaacttttatcaggttaaggaaggtttcttctatttctatttaaaaggattttttaaaatcttgaattcatatgtttttatctaatgcattttctacatcagttgaaatggttgtatgaactcttttaatatgggtgaattatatttatagattttatgttaaaatatccttgtatatcttggataaactcaactggatcatgatttatcttttttatatgctagattcaatttgttgatactttgttatgatttttgaatatatattattgtgtaaaagtgagcctgtgattttctttcttgtaatgtttctgtccagttttggtgcctggttttgctctctccttagaatgagctgggaactagtcactcttgttttctcacctataatagcatctgggtccagtgttttttatgtgggacaaatttgaacttgtggtcaacctctttaattgtaagaatattcaggtcttttgttcttcctgggctagttttttattctttttctagagattcgttcatttttcttagttttatttgcctataattgtggataatctgttttttatctgctacttctgtaattatttccacatttgatttataatattaacttgtgggccaggcgtcgtggctcacacctgtaatcccagcactttgggaggccgaggcgggcggatcacgaggtcaagagatcgagaccatcctggccatcatggtgaaaccccgtctctactaaaaatacaaaaaaaaaaattagccgggcgtggtggcaggcacctgtagtcccagctactcagaaggctgaggcaggagaatggcgtgaacccaggaggcggaggttgcagtgagccgagatcgcaccactgcactccagcctgggcgacagagcgagactccatctcaaaaaaaaaaaaaatttacttgtgtcttctctttttacctgtttgttaatttatcaaataactacttttggctttgtttcatttttattatacaataaaatgaaattcttttcattgtatttcttttcattgattattcctataattcttaaacaactttataattgatgtaacaataacctgtacacatttaaagtgtaaaatttattacattttgatccatgtatatagcagggaaatatcaccacaacaagagtgtgaacatataatctctccccaaagttttcttgtgtcttttataatcactgcctcttgcccctgcccactccctcatccttaagcaaccattggtctgttttctgccactatagattagattgtattttctagagttttatacaagtgaaatcatgtagtatagtattaaccatgtgtttgtttgtttgtttgtttctttctttctttcttttttttttagacggagtctcgctttgtcacccaggctaaagtgcagtggggcgatctcggcttactgccagctccgactccggggttcacaccattctcctacctctgcctcccgagtagctgggactccaggcgtgcccgccaccacgcccagctagtttttgtatttttagtagagacggggtttcaccatgttagccaggatggtctcgatctcctgacctcgtgatccgcccacctcagcctcccaaagcgctgggattacaggcaggagccactgcgcccagcaactatgtgtttctgatcctttgtcagggctagccaattcctagagacagtgaataactcactcataatctagctgcctcctttatgtcgctctcataggactttgacacctctctgctacaatccacctgccctgttcatttcaagatcaggtaccaggaaactcgggacatccctatgctgcagaactcactgaaattattcaaactagccagtcctaaacatgcttaccctgccttgcccattccttccgctgaaaccacataaaggctcttgcccatgttttcatcccattccattgacctccttactgaccctagctagtgcttcctcatgtggcccctgcatggcatggtgtgcaccttcctcttcggaactgcgagtaactgtcttgtcagcggcaatcatcttgtgatctgttggcctcatcatatttgaataacaataaaatctgttttaaggctgggcgcggtggctcatgcctgtaatcccagcactttgggaggccaaggcaggcggatcacgaggtcaagagattgaggtgaaaccccctctctactaaaagtagaaaaattagctgggcatggtggtgcgtgcctgtaatcccagctactcaggagactgaggcagggaatctcttgaacccaggaggcagaggttgcggtgagccaagattgcaccacggcactccagcctggtgacagagcgagactccatctcaaaaaaagaaaaaaaaaaaactgtcaaatgatactccaaaatggttgtaccattttatatttgcaacaacaatgtctgagggtactgattgctccatatccttgacagcacttggtatagctgatcttttaattttagtcactttagtgggcatatactggtattttatgttttactttttattttcctaatgattaatagtttgcagcatctttcatgtgcttatttccctttcatatatcttctttgataaaaatatctgttcaaatattttgcccattattttgttggaatacttattttcttactgttgagctttgagagttctttatatatctggataccaatcctttgtcagatatattttttgcaaaattttttcccagcctgtgatttagtttgttattctcatgtcttttaaaaaaaattgtagttaaaatatacacataatacaaaatttaacattttaactctttgtaagtatacagttttgtggtattaagcatagtcacattgttgtgcaaccatcaccgccatccatctctggaactttttcatcctccctgactgaaattctgtacccatttaaacactaacttctcattcccccttactccagcccctggcaaccatcgttctgttttccttctctatgagtttgactgctctaagtacttcatataagtggagtcatacaatattttcattttgtgactggcttattagtataatgtcttcaagtttcatccatgtggtagcatgtgtcagaatttccttcctttttaaggctaacattccatcctatgtatataccacattttatccattcatctgttgatggacatttaagttgcttcctccttttggctattgtgaataatgctgctgtgaatgttgttgtataaatatctgttcgagttcctgctttcaattcttttgagtatgttcccaaaagtagaattgctgggtcatatgttaatactgtatttagttttttgaggaattgccatactgatttctatagtagtggtaccatttacattccaaccagcagtgttcagggttccaatttgttaacattcttgccaacccttgttgttttctggattttttttattttggggttttttattttatttatttattttttttttgaggcagagtctcactctgtcacccaggctgaagtgtagtggcgcaatctcggctcactgcaacctctgccccccgggttcaagcgattctcctgcctcagcctccgagtagctgggactacaggcgcgcgttaccacgcctggctaattttttgtatttttagtagaggtggggtttcactgtgttaatcaggatggtctcgatctccggaccttgtgattcacccgcctcagcctcccgaagtgctgggattacaggcgtgagccactatgcctggccattttttatttttaaacaatagccatcctaatgggtatgaaataggttttttggtgttttgttttttttttttgagacagaatcttgctgtgttgccctggctggagtgtagtgacgtgatctcggctcacctcaacctccgtctcctgggttcaagcacttctcctgcctcagacttccaagtggctgggactacaggcgcccgccaccacacccagctagtttttgtatttttagtagagatggggtttcactgtgttggccaggctggtccacgatccatccaccttggcctcccaaagtgttgggattacaggggtgagccaccatgcacagccagggttttgttttgttttgtttttactatttttttttttttttagagacaagctgtctcccaagctgtagtgcagtggcaccattcgtatctcactgtaacctcaaactcctggacccaagcaatcctcctgcctcagccttccatgtagctacgtctacaggcatgtgccaccatacccggctaactttttttttttttttttttttgagagttttgctcttgttgcccaggctggagtgcaatggcatgatcttggctcactgcaacctcctcttcctgggttcaagtgattttcctgcctcagcctcctgagtagctgggattacaggcgcccgccaccacgcctggctaattttttgtatttttagtagagatggggtttcaccatgttggccaggctgggctcgaactcctgacctcaggtgatccacccaccttgacctcccaaagggctgggattacaggcgtgcgccaccacacctggcccccagctaacttttaaatgtattttgtagagatgaggtctcactgtgttggccaggctggtcttgaacttctgagctcaagtcattctcccacctcggcctcccaaagtgctgggattacaggcatgagccaccacacctggcccctttgcccattttaaaaattaggttgtttttgttgttgttgagttgtaggagctctttgtatattctgcatttcggttccttattggatatgtgattggcatacattttttcccatccatggattgctttttcattctgttatagtatccttgattcacagaagtttttaatattgatgaggtcctgcttagtctgtgttttgttttgttgcttgtgcttttggtgttatatccaagaaatttttgccaaatccaaagtcatgaagctttgccctctgtttccttctgagttttatagttttaggacttaaatttaggttttcgacccatttttagttaatttttgcaagtggtataagggaggggtccagcgttattgtttcacgtgtagatatacagttttctgagtaccatttgatgaaaaggctgtccattgaattgcttttgcaacttttatttgggcatatttatgtgagtctgttactggttctatattttactccattgatctatgtgtctattcctctgctaatactgtcttaaatatggtagctatatagtaagccttaacactgagtagatagatttctcccctttttttgttctttttcaaaattgtcactggtttgtttttattttttactttatgcagataatctgtactatactttggtttcatgtatcaagtagtttgttccaagttgtgctttaagcagaacaaataaattttcatattgttctttgtgttaatctgcaatataaacctataccaaattctattttgtgtatttgtttattgtagtaatctgactgactcttttgcctccagactcatctctttcaaggtccccaactgaatcttgttttaggtggaacttagaagcagtagaagttaagaatctatttcacagccttagtagtctagtttcattctctatataatgttgtctatgcaagtgagctgctctccagtgccttagtttcactaatgttggggaaggtctcttctcttgttttggacttctctatcacattgcctttctcaagagaagacatataatgaaagttgatatctggtgttctaggacttcttcagaagcttgccagtttttcaagctgatttctctcactggcaactcttcagagtgctgttcctactccaccctcccctggtggtatgtatcagttttctactcatcagcacccacctactcctgcctactgtgtttctcagatgtctgctgcctggctagctcattgctgcttttgtcactcatagagctgtcttcttccctttttttggctttctgcctgacttccagggcagctgctctgtcattgcctgtctgccattctgtcttttttccccctaccccccacagatacaacatctactctaataccacacattctccatgttcaaactaacctcatcactttccccaccacattccccaaaactggtcatcctccagcttatagcattgcagttcactgaagttagacatctgggccttgcttacctccaacatctcattagccttcgattctacccctataaatcctcttctcagtctcctttagatattcctgccctgctgtgagatccatctggtttattggctagattacttcagaaagcttcagtcagtgaccctccttacttcaaaccccaccagttgatccttcactctgccatcagtcattgcttctaaaatctaaattgttccatttaaccttgctgtgataaaacctttggtagttcttcagtgtgttcagtggtaagttaaaactttcactgtaatgtacaggccccttcatgatatgatcgctgcctcctcgagcctcattgtgtgcatttccccgccccaccctttcctcacccaccctagtctttcatgtctgccatttttacattcatttagcagatatttattgaagccccctgtgatgtccttacctaggtctttcttgttgccaggaccagacaggctttttcaagcttccaagtcatctcagtttgaaagactatgtctgacccttgtcttggccaattactctttatccttccaagttcaatgattgtcccactgcactccaaccagagtgagagagcaagaccctgtctcagtaaataaaaataaataaataaataaataaataaataaataaatcagccataatttatttaatcatgtctctctcccccattgatagacgttaagggtatttccagtattcttctcttgaaaacaatgctacattgaataaccttgtacatgggtcactttgaaagtatggatatgtatccgtggaataagtttccagaagtggaattgtgtcagaggggttgtgcatttgtaattctgatgaatatttatagattatatgagagtacctgtttactcaaactcttgccaatgcagcattatcaaagttttttatgttcgccagtgtgatagattaaaaaatggtatctcagccaggcgcagtggctcacgcctgtaatcccagcactttgggaggctgaggcgggcagatcacggggtcaggagatcgagaccatcctggccaacacagtgaaaccctgtctctactaaaaatacaaaaaattatccaggcgtggtggcgggcacctgtagtcccagctactcggaaggctgaggcaggagaatggcatgaacctgggaggcggagcttgcactgagccgagatcgcgccacaacattcgagcctgggcgacagagcgagactccgtctcaaataataaaaaaaaaagatggtatctcagcattgatttctttgatcatcagtgaggttgagcatcttttcatagatttaagagaactgtatggttttttgtgagttatgtttcatatcgtttacccattttacttttaggctggaagcagctgttttagtggaatggtggaacaagaagccagattgccatggagagacaactctttctagagatttggctatgaagcagagtagagacaatgatagctgaaggattgatgtagatgcaaagaaatttttcatcttctttgaaaacttaattgtgttaaaaactggtatgaaagggaggggttaaagctagagatggtggtagaaaaaaatgcagggttcctaaaggactgagattcctggatggaatttcagggaaggggaaaatttctggatatagtgactggggagttaagggtgtctagtccaatggcttttattttcttggaagggtaggcaaggccaacagccacatgtgtgggaggagatggttagaggggagaggaggtttgaaggcaccgctatggagaattggagagagctaaggaaagacagaaagactgcagaaagtgcttagggttccactgaagcggaaatagtgatttgtagtgatacaacccttatgagttatttgatttttttttttttttaagcagcatctggcagtccaagtatagggctgacagtttgggatttttctttccatgttggtgtaaaagaagaacagtgtagtgaaggaagttaggacaaaagaatgattgaactgacaccaagttttcttgatttggtagaaaaggaaataaagatagagcagagatattgaaaagaattagagaggggttcaagagactgaaggcctgggtgaggtcagagagcaggtgtggtagacataacagagagaactacaaggatagaaagtgtggttggagagtgggaaggcaagatttattcagtatgggggcttttctgggtgatgacagcatctggagtacagccattgtcgtgagtggcccaagtgtagcagagataaagcgttgttggagtgaaggaagtcaaggaactgagaggctggcctagatggggattttggttgtcatccatgaggatattgaagtcatccaggagaatagcaggcctgggggacaggaaggaaactgagccacttacagtgtcttcagtgataggaaagcacagggcaaaaagctttcaagaacagggactgttaagccgggtacagtggctcacacctataatcctagcattttgggaggccaaggcgggtggatcacttgaggtcaggagttcaagaccagcctggccaacatggtgaaaccccatctctactaaaaaaaaaaaaaaaaaaaaaaaaaaagaaatacaaaaattagccaggcatggtggcacgcgcctgtaatcccagctacttgggaggctgaggcaggagaattgcttgaacctaggaggcggaggtggcagtgagcctagatcacaccactgtactccagcctgggcaacagagcgagactgtatcaaaaaaaaaaaaaaaaaaaaagaacagggactgttagagcaggctccaggagaaatgctttgcatatggcattcttgaggagtgaggaggacctcaaccctacttcctgaaatggagctctgagatgttggagtagaaatttggaaaccagagagagaagtaaggatagtgttgttgcaaatgcattgtatatggggggtcgggaagtcacaggagtttgcctcaaagtctttctcggagacggatgaggttttcactgtgattttcctggtcgtggtctatggatatagtacctgttagtgacatggatcttcttaacttctgatgtgtcttttcctccctagtgtacgcataccaattctctccacagcttccatcaccatgcatttgttcttttcccttgttcttgtattacctttctggaaaggaatttttattgtaggctaattgttactcccaccagtatttaaccactggatatttcatatgattgatctcttctgatttggaaaataaaaatgtaatctcattatattcatttgattagtggggacagtcaacacttctttgtgtattttcttagctgttcgtttttctcgtctgtaaattatctgtttaggtccttcagatttttcaaaattggactgttatgttttcagtattgttatgagttcttgtttcaattatttatgacagttcattttcttttttaaaatagactttttttttcttagagaaataagaaaaaataaaaattaaaatagactttgtgttttagagagtttcaggttcacagcaaaattgatcaaaaagtatggagagttccggccaggcgcggtggctcacacctgtaatcccagcactttggaaggccaaggtgggcagatcacaaggtcaggagtttaagaccagcctggccaatatgatgaaaccccatgtctactaacaatacacaaattagctgggtgtggtggtgcacacctgtaactgtacctactcaggaggctgaggcagaagaatctcttgaacctgggaggtggaggttacagtgagccacagtcatgcccctgcactccagcctgggcaacagagtgagactccgtcctaaaaaaagaaagaaagaaaatatagagcattcctaaataccacctgtccccaacacctgcacagcctcctcattatccacatcctacaccactgtggtacctttgttgcaattgatggaccaacattgactcctcattatcacccaagctttggtgttgtacattctgtagatttggacaaatgtataatgacatgtgtctaccattgtagtatcatacagaagaatttgactgccctgacagtcctctgctccacctgcttactcctctctcccttttcctaactgcacaaccactgattttttttttttttttttgagacggagtctcactctgtcccccaggccggagtgcagtggcgccatcttgggtcactgcaagctccacctcccgggttcatgccattctcctgcctcagcctcccgagtagctgggactacaggtgcccgccaccacatccggctaattttttgtatttgtagtagagacggggtttcaccatgttagccaggatggtctcgatctcctgacctcgtgatccgcccacctcggcctcccaaagctgggattacaggcatgagccaccacgccctaccttttttttaaaaaacaaggtcttgctctgtcacccaggcctgagtgcagtgatgatcactcctcactgaagcgtcgacctcccaggctcaagtgatcctcccacctcagcctcctaaatagctgagactacacacacacaccaccatgcccagctaagttttgtattttttatagaaatgtggtcttgctgtgttgtccaggctggtcttgaactcctgagctcaagcaatttgcctgccttggcctctcaaggtgttgggattacaggcatgagtcaccgcacctggccttttttattttctttttttttttttaaccagtgatcttttactgtctccatggtttttcacattggcttctgtcacttagtaatatatgtttaagtttcttctacgtattttcatgtttttagcttatttctttttagcagtgagtaatatttcattgtctggatgtgccatcacttatttatccattcgcctgctgaaggatatcttgattgctcccagtcgtggcaattataaataaagttgctgtaaacatccatgtgcaggttttttttaagtggcataagttttcatctcatttggttaaataccaaggagcacaattgctggatcatatggtaagagcttatttatttttttgagagactaccaagctgccttccaaagtggatgtaccattttgcattcccaccagcagtgaatgagagttcctgctgctccatattcttacaaacatgtagtattgtcaaatgttttggattttaaaaccaaaatccattttcatagatgtgtagtggtatcccgttttaatttgcaattacctaatgacttgatgttctgtgtcttttcagatgcttatttgccgtactgtttatcttctttggtgaggtgtctcttcaggtcttttgcccatttttaatctggttgttatttttcttgttgagtttaagaattctctgtcctttgtcagatctatcttttgcaaatattttctcctagtctgtggcttatcctctgattctcttggcattgtctttcacagagtagacattttatattttaatgaagtccagactatcaattatgttctcatggatcatgcctttgatgttatatctaaaaagttctcgccatacccaaagtcatctagattttctcctgttatcttcttggcattttatagtcttatgattgatatttaggtctatgattcatttttagttaaatttttgtgaaagataataaggtctgatatggattaatttttctatatgtagctgtccctttccagtatcatttgttgaaaagactatcttgctccattttattgcctttgctcctttgtcagttgactatatttatgtgggtctgtttatgatctctgttccgttccattgatctgtttgccttttcttttgctaataccacagtcttaattaccatagctttaaagtaagtcttgaagtccaatagcattaatctttgactcttctttaatattgagttgccccttcagaatcttaatgtctctccatgtaaactttagaatcagcatttttatattcacaaaataacttgctgagattatgattgagattgcattgaatctataggcttatttgggaataactgacatcttgacaatattgagtcttcctgtccataaacattatttatgatgggcttcttctttatgtttaggagcttttgttttttctgtcagatattccacttctacctttatgatttcttaattgccttttatgcttagaaagtttttcctcatcctgagctcacatattcatttattttcttttaaaatgtgttttcaagcatttaatttttaaacctatgtggaatttattttggtatatggaatgaggtggtggtctaactccctcctctcaaatatgtagttatttttcccaaaaccattttctattaatttatcaagaatagacatgtatacatatacatatataatagtcagccttccacttgttgtttgacccttgtgaaggaaattgtatgagtttccaattttggattaggctcaggtagtaattgagctgggttctgccagagatccatgttaattcactatccaaacagagttataaaatgtaagttttatgaaaatctaacagtatatcactggtttaatgatcacagcctaggaagaatggggaaattgtcaaaatcttctgtggatgcacctgaaggccactgctgaacccatttccctgctaggcacggctgctggtaccaggggcaaactcctggagtatatatgaaccacctacatctccttctcttccccccctacccttgagattttcatgtgtcccttaaggatgtgtgtcctacttcccttggagagtcactaccacattgaacactttagactgtgagtcctgtgaagatggggctcatgagtgtattgctccccagttgtttctctagcactagctcagtatagggcataaaaatctgaatggatgaacaaaccactattactggtggggacatgctactatcttacatggttcgaggtggaataaaggttgagaacagctatataatgtgttccttgaagggcagcagtacatcagtgcaatcagcctaccttctccatacttctcactctgaaaactgtaaagctgcacctagcaatcaacttgggagctttaaaagggactgctccctagctctcacccacaaagctgtagtctagcacaggtgacttttttaaaaaagttttttggtccagatgtgatgactcacgcctgtaatcccagcacttcgggaggctgaggctgggaggtcacctggggtcaggagtttgagaccagcgtgaccaacatggagaaaccccatctctactaaaaatttgccgggcatggtggcacatgcctctaatctcagctactcgggaggctgaggcaggagaattgcttgaacccgggaggcggaggttgccgtgagccaagatcacaccattgcactccagcccgggcgacagtgcaagactccgtctcaaaaaaaaataaaaaaggagtcctattaagacttatttttacaggttggatatctctaatcccaaaatctgaaatgctccaaaatttgaaactttttgagcgcagacatgatgctcaaaaaaatgctcactgggacattttggatttcaaaatttggattagggactaggtgtgggagctcacacctgtaatcatagcactttgggaagttgaagcaagaggatcagttgaacccaagagtttgagagcagcctagacaacatagtgagacgccgtctctacagaaaattttaaaaattagccaggcatcgtagtacatgcctatagtcccagctactcaggaggctgagacagaaggatcacttgagtccaggaggtagaggctgcactgagctatgatcataaccactgtctccatcctgggcaacagagcaagaccctatctcttaaaaaaaatctgaaacactgctagtcctcaagataagggatagtcagtctttataaagactcaattagttattggatatctgaggaagcatgcatatcaggctcccaaaagatcattggtttaggcacacattttaatagcttggaaatccagaatactcttctggtgaccagctcagacatagtcctgataatataggacctcatctaacatgactccctattttccagataagcatggattcctggttcattcttgttctgctcggcagtggtctgatatgtgtcagtgccaacaatgctaccacaggtaaattgtcatttgataaggctgctatttgaaatgaaattttgctttcacatttaatgagccacatttgaaaaccgagatggtatttgaagaaaggaatataaaaattttattcaaagtgatggtaaaataggtgtcttcagaaatcttggaattgaatgctcagcattgtttttcatacatacataactgctttaaataaatcaaagagattatgtgttctttcctgaaaagtaaaataaattgttgacatttacaactctatatatggtttctgaggaactaagtgaagaatcttgtgtctttctcccttaaaccgtagtcctttggaggaggtaggaaaggtccagcatgagataaaaacgtagggggtgggtggtgttgagggggattggtctttgcttggtctccatatgtttgagagtttattaaggcttgctgctttgtgtctcacagctttttagcctcacattcttcatgtgctatttccttgttttttggtgtttgtagttgcaccttctgtaggaattacaagattaattaactcatcaacggcagaaccagttaaagaagaggccaaaacttcaaatccaacttcttcactaacttctctttctgtggcaccaacattcagcccaaatataactctgggacccacctatttaaccactgtcaattcttcagactctgacaatgggaccacaagaacagcaagcaccaattctataggcattacaatttcaccaaatggaacgtggcttccagataaccagttcacggatgccagaacagaaccctgggaggggaattccagcaccgcagcaaccactccagaaactttccctccttcaggtactagagatgattctgtttgttcttttgctctttgagtttagtcttccttttattatcttgtttgtgttttctagccttaaaatttcttcaaataagtaaaattgctcaagtgaagtaatgaaacctgtatgtggaatttttgggttagcatgagtgaagaggaaagaagaaagattctggagaatatctttctgctaggtgggatcctggttagattgagaggacttaaatgtgtttaaaggtagagaagaaggcttaaaaagacaagagaaatagaggagctcattgacgatgcaagagactgaagatgaaaagatacagagaatgagtaataagattaggtttggaaagggagggatccgtggagaccatggaaaggagaatgggtattgatgtccatgacagttagatgtgagatacagagaatgagtaataagattaggtttggaaagggagggatccatggagaccatggaaaggagaatggacattgatgtccatgacagttagatatggagtggcaggccagtggccaggggtggcatcaggctctgggaaatggttacattgcagtgccagttgttcagggcctcaggttgaagcagtagtcccaaggagaaaatcagagacgtggatctgagaccagggcaggtaagacaagtttctgacctctttgaaccttaggtaccttgtctgtaaaagaggattagagataccctcaaagggcttctatgaggagtaaaggaaataatcattacctgattgctatgtaactgtcatcccttttctagcaaaaatcactctttcctcttctgtgttcccagttagatggtgagtgcccctaagcagaatcacatctcgctcatgtggaacattcaggaactgtttgctcagttgattctcatttgttactacagatgatatcttttactgcgccttataactcagacccttcacctgccagcttttccccatattttctaccgtaaagacaagacagcatttgcagttaagagcacagtcttcagtgccacactgagtttgaatcccagctcttccataaaccagccatgtttatggcatagctggcttactttatctctctacctcggtttgttcatctgtgaaacaagaatgagtgatagtaatagttcttacctcatagaggagatattaggattaaacaagttaatatgggtaaagcacttataaaggtgcctacacatggtaagcactatttttaagtgtgagctgttagtattgttgtggttattgctctgatagttaccagtaaaatatatgaaggtacctttaatgcagatggcatcccactattcttgatgagataggggactgcagacaaataatgtctgatacttgctttgtgctttagagttaatgtagttttgtcatagttattactgtgtgctaggcatcgtactaagagttttctagaataatcctatgaattaagttctattttatgttttataggtgaaagtattttacaatgatgaaaccataatttgtggaatgtttttcagtgtacaggtcatgacacaattcatgaaatcactttagcaggccaccactagttgtttgttttgttttattttaatggatgatccagttccatgtttattcttttaatgttacatacaattttttgaaattttagtaacaacataaaatgttgggttgtggccattgcttagggagaaaggcaggataacttgtacaaactgtatgagtgaatggaaaaggtggagactgtaacacaggcctgactgactgaacagcccatgttctattgtgtactgtctttcatttaacagttctgtgacatgaccatggataatcatctccttttaacagatgcttgatttcagactgtatatagaggttaaatgatttgttttagatctcaaggctgacaaattaggcctatttctcacttttgcggtctttccactctgcttgtagggaacttagttttccataaactgacttaggtccaaattgtgccacagctaagaatctagttattgtacatttaacacagttcacgtcataggaggctgagactatgtttctctagtggcgtttattcaagatgagtaaaacacaagaaaccattatcgcacatgggaatttcatagtcttaaaccccacatcccacttatcaccaccatttaccagtcctcctgtaacagttacaattttttattaaatcagtatttgatgtatattattgtaattatgaaatattcattgctgagctataagtataaatggattgtttttcttgtacagttttttttctggatttaatacttaccttattttttgtttatttagttttctatttagtcaggccaggcacactggctaacacctgtaatcccagcactttgggaggccaaggtggacagatcacttgagctcaagagtttgagaccagcctggggaacatggtgaaaccccatctctacaaaaaatacaaaaattagctgggcatgggtgcatgtgcttgtagtcccagctactcaggagcctgaggtgggaggattgcttaagcccaggaggttgaggctgcagtgagctgtgttcataccactgcactccagcctgggtgacaaagcgagaccatgtctcaaaaaagttattgctactcaattcttaccatgctctccagagcctctcaaaacagctttctacaaagtgagatctgttagataatctatttcttttttacctctagaaattcctcctgagccctccattgtcttattccagtctaggcttgtcgatctctagggctactacacagatacatcagcctgagatttcccttctctgtcattctgggaattccccttgctgctgcttcctgacttccatattgtcttcctttttgtcttctcatcattcggtagattcctgagaaaaggggtccatgggaggcaaattgcatccttacatatctaaaaatatctttagggctgtgcatagaatttgaggaatatttttcccccagaatttttaaagtaatgccctaactgacacctgtttaccaggtttggaggattttactgctatcttaatccctaattgtttgtatgctttctaggatcttctctttatcatcagtatcctgaaatttcacagagatgtatcttgatgtgggtctttttcgttcattattatggatacttaataggccctttagagccttgatcttgcatttctgaaaattttctcccatttctttgaaaccttctccccctcttccttttttttttttctcaaattcttaatatttggatattggatgtatcctgaattaattctttaatctttaaaatttttcctttctgttgatctttgctttgagtctttttctccttttaaaaataaacaaaggccagctaggcacagtggcttatatctgtaattccagcactttgggaggctgaagcaggaggatcgcttaagcccgggagtttgagaccagcctaagcatcgcagcaaaacctcatctctacaaatgatttagaaattagcagggcctaatggctcatgcctgtggtcccagctactcagggctgaggcaggaggattacttgaggcctggcagttgaggctgctgcagtgagctgtgatcgcaccaccgtactccagtctgggcaacagagggagacctcatctcaaaaataaataggcctggtgtggtggctcactcctgtaatcccagcactttgggaggccaaggcaggtggatcacttgaagccaggagctcaagaccagcctagccgacatggcaaaaccctctgtctacctactaaaaataaaaaaattagtcaaacgtgttggcatatacttgtaatcccagctacttgggaggctgagacatgagaattgcttgaacctgggaggtggaggttgcagtgagtcaagtccctgcactatagcctggggaacagagtgagacccgagactctatctcaaaaaaaaaaaatcagtgacaagtaaaaaggtagaatacctttttttttttctttgagacagtctcaccctgtcgcccagtctggagtgcaatggcgcagtctcggcatactgcaaactctgccttcagggttcaaacaattctcctgcctcagcctcctgagtagctgggattacacatgcccaccaccacacccagctgttttttgtatttttagtagagacaggtttcaccatgttggccatgctggtctcgaactcctgacctcatgatccacctgccccggcctcccaaagtgctggtattacaggcgtgagccactgcgcccagcctagaataccttttaaaaataaataaataggccgggcgcggcggctcatgcctgtaatcccagcactttgggaggctgaggcgggcagatcacgaggtcaggagatcaagaccctcctggctaacatggtgtaaataaataggccgggcgcggcggctcatgcctgtaatcccagcactttgggaggctgaggcgggcagatcacgaggtcaggagatcaagaccctcctggctaacatggtgaaaccccatctctactaaaaaatacaaaaaaaaattagctgggcgtggtggcaggtgcctgtagtcccagctactctggaggctgaggcaggagaatggcgtgaacccaggaggtggagcttgcagtgagccgagattgcgccactacactccagcctgggcaacagagcaagactctctctctaaataaataataaataaataaataactccttttacaaaagcatatatattcattttttccatttataatataaataatagatatgctgagttgatttctgcatattgctttttcagttaccctatcatacttgctctttgttttagtaaagagctgctgtattgaaggatataccttaatctctttatccagtttccccatcagtggacactaagattgttttcagagtactcttataaacaatacagtttgtcatttcagacacatatgagaatattagcaggatgaattattttaagtctgcatttataaatttatggatattgccacatttacctctgctaggaagtctattcctattaacaatatgtcaaagtgcctatttttctaaactctcttcagtgtggtgaattgttaaacttggggatctctgccaatctgacaggtgaaaaataacatctcagtgtaagtttaatttgcattttgctgagattgagcaattttgtgtaatttaaaagatcatttatttttctgagcattctctgttgatattctttacccatttttattagagtgtcaaggttttcctgactcgtttgtagatgttctttgtacgtttgggaaatgagtcctttgcctatggtaaaactgcaaatgttgttccctaggtggtcatctagattttctgcattgcagaagatatcattagctatttttaatttttttaatttaaatatttctcagtttaggttttctaggaattgggtcatatctaggaaggctttccttactccaagattataaaaataattttcttctggacttctatggtttcgtgtgtgtgtgtgtgtgtgtacacgcacttaagtctgtctcgaatttattctgatgcagagtgagctatggatctgtttttccccaaatatctaacttgtcccaataccccttaataatttatttttcctcattgatttgaaatgccacctatcttatatattgaattcagatatttatttacctcttcatatgtatttgagtatttgggaacattcattttattttctattaatctttttctctgtccatgtgcaaagcctcactgtctcaataattgtaactttgtaaagtatttaatatccagtaaaatgagtcattccttgttaattttatttttcagaattttgttagcaattcttattataaacattagaattaacttgtctagcaggaaaaaaagtttgtattgatcatgttaaatacgtagattaacagagaaaatggcatcttacagatgttgagtctaactatccaagaatgcaatatattccattttctgaagtcttttttttttaaatcttctgtttttgtaattataaatggagcattttcttccatcagatcttctaactggctgctgttggggatatgaaggctactgatttttgtagagacattttgtactggccaccttaaactctcttagtattggaagtaattttcttcattaatttttatggcttcaagtcatctcatctgcatatatcttccaaatttttagaactttctttttcttctgtttaatcgcattgatgaatacctccagaacaaagttaagcagctggtaaatgcagacagcattctcttgtatctgacactaaggaggacactttcagtggtttttcattatacgtggtactgactcttgagttgagataaacatattttattgtgttcaggatttaatgagcgtttatgttaggaatgggtgttaaattttgccagttgcctgttcaggatcaatgagaaagatctgaatgattttttttctcttttggtctgtttctatggtggattctattcctaggtttgtttgtttgtttgtttattttgagatggagtctgttaccaggctggagtgcagtggcgccatctcagctcactgcaacctccacctcgcgggttcaagtgattcccctgcctcagcctccgagtagctgggactacaggcacgcaccaccatgcccggctaattttttgtattttagtagagacgtggtttcaccatgttggccaacctggtctcgaactcctgaccccatgatcctgcctcagcctcccaaagtgctgggattataggtgtgagccactgcgccctgccagtttttatttattcattttttagagacagggtcttgctctgaattaattctttaatcttcttaatttttcttttctgttgacctttgctttgctttaagtcttttcctttgagtcatccaggctgaagtacagtggcacgatcatggctcactgtaaccttgaactcccagacttaagcaaaccccacctcagacttctgagtagctaaggactataggcgcatgtcaccacgcccagctaatttttaaattttctcagaaacagggactcactgtgttgcccagactggtcatgaactcctggcctcaagcagtcctcagccttagccttccaaagcactgggattataggcatgagccaaggccgcccaaacatattgtatcgttcctgtaacaagctgttgcagtctatttgatattatttcttatttttttcatttagaattttctctgtctagatattctcaaattatctctaaatgagattgatctatgtttttcctttgtgtgtgtattctttttgataagttttagtttttagtgttttgttttgctacatggaaaggatttgaaagtttacactaaaaaatatgctttttttttttaagacaggctttttcactgttgcctagtgctggagtgcagtggcatgatctcggctcattgcggcctgcacctcctgggctcaggtgatcctctcacctcagcctcccaagtagctgggattacaggtgtgttccaccatgcccagctaattttttgtatttttttgtagagatggggtttcgccatgttgcccaggctggtcttgaactcctgggctcacatgattctcctgtcttagcctcccaaagtgctaggattacaggtgtgagccaccacatctggccatttcattcatgttttcaaatgtatttgaatgaggaaaagttctcccttgtgattatttattataatagcctacagagctattaatttttaaattttgtttactttatgtctcctttttttttttgtttaggctgaataaccatttatttcataggtttattgccttttttcttccaaagaacttgctattgtgcatttatagtccttttatgtttacgttttctatttcattgatttttactttctaccttctttagatttattttgttctttttctatcttcttgaattgagtgtgctttaattgcattctttccagttaattaacatatttagtgctgtgaattttgaacaagcacagctttagccacatcccataggtgtttctataggcagttgtattaggatgcgctataagctgctctgacaaagataccaaaattcagtgacttaaataagaccaaagtgtctttctctccccagttacattccagaggtagacagggccttcgtctcagtagggaccaaattcctttcctcttgtggccctgccatcctaacaatattgcccttatctgtttggttagagatagttctcaccattgggttctagttccaaccactgcgaaggacaaacaaagggaataggggccatttctcttccaaaagatgtgacctggaagttactcacattgctttagctcacatcccgttggctagaattcatcacatgaccacacctagcacaaaggagtctcaaatatagtctgccaggagagcttggtgctcagctaaaaaacaaaggttctgtatcaaggcaagaagagaaagagactgatctgaggggaggagagttggcaggttctgtcacaaaacttctcgtcattgttatttttaaggtatttttccattttgggttttttgtttgtctgatttttttttttttttttgagatggagtctcgctctgttgcccaggctggagtgcagtggcgtgatctctgctcaccgcaagctctgcctcctggttcacgccattctcctgcctcagcctcccaagtagctgggactacaggcgtacaccaccacgcctggctaattttttttttgtatttttattagagacagggtttcactgtgttacccaggatggtctcattctcctgactttgtgatctgcccacttcggcctcccaaagtgttaggattacaggcgtgagccaccgcgcccggccgtctgtttgatttttgagatggaatctcactctgccccccttctggagtacagtggtgtgatcttgggtcactgcaacctctaccctcccaggtttaagcaattcttgtgcctcagcctcccaaagtgctgggattaaagacgtgagccactgtgcccagcccattttggttttgatttttttttttctttgaaatagagtctcgctctgttacctaggctggagtacagtggcatgatctcggctcactgcaacctccccctcctgggttcaagtgattctcgtgcctcagcctcccaagtagctgggattataggcacccaccaccacgcccagctaatttgttttgtatttttagtagagacggggttttaccatgttggccaggctggtctcgaactcctgacctcaggtgatccactgcacccggcctcattttggttttgatttttattttcaaatgttttcttactttgtcaatttctaattttattgcattgggacaaaagaatattgtactctttctactgttggggtttataagggctgtggatatttcactcgcctttgaaaagaaggttttctctgttagtctgtagagtttggtatgtaccaattagattttattacttatcattttggtcttttgtatccttacttaattttgtcctcttgaattttaatggagcaaaagacataaagtcctctaataacatgcgttctgtttgcattctcatactttttatgaatattgatgctgcactatttgtgtacccagggagaaggccagaccactgtccaaagtttagtgaatctgggcagccttgtttcccagttgttggaggatgcctcatggaggaaagcattcctaatcctggagcttgttttgttgtactctaattgaattgtaatgtgtttctttaacctgaatgaatgtttctattttttacttattacacaggtaattctgactcgaaggacagaagaggtgagctgctcaccttatatctgttgttccttttacacagtgtacagtattcatttatttcctctgctcacagtctgtggtaaccgtgtgcatctgtggctgtgttgtttgtttactttcccttaagttatttccatgttaatctcatggagaagagcaatagaaacaagtactgtattcagtatgttttttaatatagactatggattctaacagctatgatgtattttaacaagtaacaaaatatatcttactttgacatgtcactttgttaacattactttttggtgatattaggtcataatttctataccattagttacttctgatttctaggccacagttccctttaaatattctttgtgttgtttttcccctagtgtataaaatgtcaaccctttgtggctttatatggattttatggattttcagcccttaaatgtaaagtctctatggcctgagatgttgtgtctgtggtttaagctggactgctgagtccctggtcactagagagtagggggacatgggtacttgtctgcagaagtgtggcacattttgcctagaatgacagtaaggctgctatcaaagagcatgagagaaagagaaagagatcatctaacattctaagaagtgattattacatttgagttttaaaaatgttactattcgaagcagtgtttttatcataattttctattttatcaaatcagacttgagttttttttctgattctgttatttaaccatacacaattttccctgtgtaattaagtaatggaacacttggaggcatatgaagtcccactaagtagggagcatttgagtcagaaaagtgggtactctcttcctttatgtgatgtccatctgccattgtatttggtaaggaatagtgaggtgttaccatactgtgtacagatttccctcacttttccacctctcactttcctaaacttgggaactaaacattggattaatacagtgtctttgctgttcagattcacttgccagattttatcaaatgtagacttaaataggttttattgtgatagatatttacttgctccctaaaactgctctcttaaccagccttacaataaagtcaaaagtcaaagtggtaggcttcaagatgaaacataagatctgttgactccttcctctatttagtatatattttcataatattcagccttttcttgccccagatatcatatctattttacctacccaatatttaagtagtttccatgttgtgattaagaaaacaaaattaccataattacctagattattgctaattgtgacatatgtaaagtctattaatgtaataaatctcctttcttaagtcaaaaaataattttgtgtaattccaaacaggaaactgaaaaggcataggtattctcagcagtctctaaagtcccaaaatctaatggcaattttaccagagcagatctttagaagtattgctataaatttggatatcccattctaattttaagccaaatgctttttgagaaataagccagctgtttggaaatgcttgtattataatcggtttgataagcagttatgtcttatgcagatgaattaggggctacctgtttttatgcactggtctttggggtgcttttgaacagtagtgtctgatgttttaattgtcaaagcaaaaagaaatgagagggagggcaacttttcttcctcttctgaagtccaggaaactggttattttctcatgcatattattttaaaatatattccagccaggtgcagtggctcacgcctgtaatcccagcactttgggaggccaaggcgggtggatcacaaggtcaggagttcaagaccagcctgaccaatatgataaaaccccatctctactaaaaatacaaaaattagccgggcgtggtggtgtgcgcctgtaatcccagctactcgggaggctgagtcaggagaattgcttgaacctgggaggcagaggttgcagtgagccaagatcgcgctcttggctgcgatccagactgcactccagcctgggtgacagagcaagactctgtctcaaaaaaaaaaaaaaaaatcagactcttaatatttgtaaagaagtagtccttgagctactacttaagtctagaaagagttgatattcttgttttaagagtgttagggcactttgggaggctgaggcaggtggatcacttgagcccaggagttccagaccagcctgagcaatatggggaaaccttgtctctactaaaaatacaaaaattaaccaggcatgtggtacgtacctgtagtcccagccacttgggacgctgaggtgggaggatcacctgagcccaggaaatggaggttgcagtgagccaagattgcgtgactgtactctagcctgggcaacagagcaagactctgtctcaaaaaaaaaaagggcggggattatcatagtgccattattattatgagtttatgatggctttctctaagcaccttttacattcggcatttattcagtacctattaagcatcaaggagtccagaaaaaattttatatataaatatatataaaatatgtaaatatatatatgcatatgcttccctatctcaggaaggaaatatgtgaacatcaggaaccgaagtctactcagttacatgccattggatatatcacacaaagtgctgagggaactcagaaggctcattatatctggggagtgggaaggaggcacagagatgtgctttgggaagtttaaattaaaatagcaaatggggaaaatgaagacacaccagacagggcacaagcaaagagacatgaaagagtaagtcatgtgtttgaggatctgtgcgcagttgacatgtgtgaggtgtggggagtgatcagaggtggcctcaacagaatgggtgtggtggtccactgagttcaggagttggagcatctcctgaagatgatggtgagtaaggaagtaacatagtcagattttggttttagaaagatattccagaggacttaggggagatagatggacaatagaaatttaggtttctgaataatttggctcaaaacaacggtgattgggctcaacccagtggttagattctagaggcaatccaatgaatattgctgtttttagagccaataggaaacatttaaaacaacattacaaccttgcctttgagagctgataaatacttgtaccaaaaagtgtggcaataggtaaatgggccataggaactggggctataggactatggctattcctttactgactagtttgtagttgaccagtgtgtgtctgaagtccttaagtcactcacctgtttagaggtgagcccttcaattaatatggccctttgttttcaaggaaagaagttatagcaagtaggtatctgttgtcccgggacaccattttagtggttttcattttcatgcttgctccctggcctgaatctagaaagtaaaactttgctggaatgaagttggggttgaaacagtttcggtttgtaaccatactgtctctgtctcatctactcagctctgcctttgtaatgtaaaagcagccatagatggtatgtaaatgaatgaacatggccatgttctgatagcattttatttacaaaaacaggcagtgggctaaatttgggctatagtttgccgacccctcttctaggcaaagaactgcctgagcgtaggaagctggactgaggttctctgctagtgtgtgaacttgtggatgccaaagccaatctcttcccttcatgtcagacactttgcaaatgttacctcttttagatctcccattaactctaaaaggtggagggtgctattatgcttccatttcatacattgttctaagagattatcacactactagtaagttaggatagtaggaatttgaacttcaggtctgtcagaccctaaaaccccatgccctggaaatggttttctaaggctggcctgtggttcgttggttgatttcaattagaatttaagaattttttcagaatacatctaggtgtaaagatttttttgtcaatattactccacaaactagattatttcttttggcctgataactcaggaactttcttgtattacttctctcccttcttactggtttcttctttggactctcctgttgcacaggtattggatctcctggacctatccagttcctttcttttctatgctgtcatatttttcatctcttattgctctgtgttctgggagcttccaggacagttgctctttcacacaactaatttggttttcagttatatcagttctcctatttagcctttctttttttggaggcagggctggggcagactcatgctctgtcgcccaggctggagtgcagtggcctgatcacagctcactgcagccttgacctctgggactcaagcgatcctccagcctcagcctcccgggtagctgggactataggcatatgccaccatgcccagctaatcaggtgtttgtttgtttgtttggtagagacagactaccagagtctcgctaagttgcccaggctggtctcaaactcctggcctcaagcagtcctcccaccctggcctcccaaagtgttgggcttacaggcatgagccaccgtgcccggccctgttaagcctttctatctagattttttccctcctaatcatgttggtgtttttttgtttgttttcatttttgttttgttttgttttgagacggagttttgctcttgttgcccaagctggtgtgcaatggcacgatctcggttcaccgcaacctctgccttccaggttcaaacgattctcctgcctcagcccccagagtagctgggattacaggcatgtgccaccacacctggctaattttgtatttttagtagagatggggtttctctatgttggtcaggctgctcttaaactaccaacctcaggtgatctgcctgcctcggcctcccaaagtgttgggattacaggcgtgagccaccatgcccggccagtttttaaagaactccttcttactactcagattactcctttttaaatagtggcttttaaaaaatatcaatgtaggctgggcacagtggctcacacctataatcccagcactttgggaggctgaggcaggctgatcacctgaggtcaggagttcaagaccaggctggccaacatagtgaaaccctgtctctactaaaaatacaaaacttagccaggcctgcagttccagctactagggaggctaaggtgtgaggatcgctcgaaccaggaggccgttgcagtgaaccaagatcacgccagtgcacttcagcctgggtgacggagtgagactccgtctcgagaaaagaaaaaaaaacgcaatgcagcagtggctcacgcacataatcatagcattttgggaggccaaggcaagaagatcacttgagaccaagagttcaagaccagcctgggcaacaacaagaccccctccccccatctctacaaaaaatttaagaaaaaaaatttttttaaatcaatatggcatcctgttgcacaaattgcagtatattttgaaagatttattctgtttcttttgtcacctccatttcccagggctactgttgctctgtttgagctatgccctggaccattgagtggcttagactgtgctcacaataggtgtcccttcatcccttcagaagacaaacatggacatacgtcctaaaccaggaaggggttcagtgatggctcaggaaaatcggggcagggtgcagttatcctctaggcgagctgccgttttctttttcctttcctctcttgtggttgcctagaattagcttgggcactactatggtttttttctgtctgcaggccccaggagaccttctgtggacccaatatacttaacaatcatatgcagtgtagacctgctctggtgtcaattctaaccaaaacaaaaaaaaagcatttatgagacactcagggaaattcaagcagtaactgaataatattagatgatactaaggaattagtgttactttttaaattggataatagtattatgtttatgttaagaatcttgatctcttggtgatacatacctaagtaattgcatttgaaatgctaggtctcggatttgccttaaaagaattcagttagaatggcgtgagtatagaccagtggttccttactgggggctatttcccccacaaaggcatttagcaatgcttggagatacttttggtcatcaaaattgggaatttgctacagacatctaataattagaggctagggatattgttaaatgtcctacagtgcacatgacagacccacataacagagaattgtatagcccaaaatgtcattagtgtgacgttgagaaaatatatatgcagcatatgttttgtaaaaaagaagcccttaccagtctctgtgacaaactctctactctgtgtagagcactgtttttccagctgagtctagatgggaagccccgcttgtcatttgggctgtgggtgtactggtgctgggttggcaggcctttgcttaagtaccatcctggtacctcaaggtccactttcaaccccagtcccaattccctctgagcttgaggtgtttccaggcccaaactggtagaactagtacttagttttcagctggaggctctttggctctgtttgatctcttggacatcgagtctggtctgttttgtcttccagaaatctctcaaagattctgatctacatatgccaccgtttgctgcctttcagatatgctgttgattcattagtatttttatatttcttctaccatgtcagtgtgctttgggggaagatgaagtaaattcatggatttagcccagtgtcttaagccaaaggtgcctaattactttcttcttcttctttttttttttttttttgaggcagagtctcgctccgtcacccaggctggagtgcagtggcacgatcttggctcactgaaacctccgcctcctgggtacaagcgattctcctgcctcagcctcctgagtagctgggaccagaggggtgtgccaccacacccgctaattttgtatttttagcagagacggggtttcaccatattggccaggctggtcttgaactcctgaccttgtgatccacccgcctcggcctcccaaagtgctgggatgtgcctaattactttcttataatacctgatatactgccccctgttgttggaatttaacaaagacatttagtgataaattactatttttttttgttctttggctcaacgtaatccattgtttgttttgtgcctgttatgtgtgagaccctgtgctaggttttaggtgtacagtgagaatgaagcagacatgtaatccttgctcttgtggaatttatgctataaaggagggatattcattaatcaacaaagtcaaatatgtaattataaagtgtgagaggtattatcaaggaaaataataaggtccttgccttacaaaaatagtataggaaataacagcaattttttttttttttttgagacagagtctcgctctattgcccaggctgaagtgcagtggcgcaatctcggctcactacaacctctgccccccaggttcaagcgattctcctgcctcagcctcctaagtagctgagattacaggcatgtgccaccacacctggctaattttttttgtatttttagtagagatggggtttcaccatgttggccaagctggtctcgaattcttgacctcatgatctgcccacctcggcttcccaaagtgctgggattgcaggcgtgagccactgtgcctggccgtaacagctaaaatgaagtacacactgtgtgctagttactgtgccaacaactttacatgaaagatctcatttaatacgcagaataacttatttcagaaatgaggaaactgagacttatgatcctaatttagtattaggaagtcagagaagacctgtgtgggaaaagtgacacacagagaaccagacaagtaggagataaccaggcaaagaacagagagaggctgtgtaaagcagaaggaataacatgctcaaaggcctgaggatgaatgaatgaaagcatggaaggacaccagtggctgaaattgagtgagcaaggaaagagtgcaagagatagggcaggtaggggctaaatcgagggggttgttagagtccaggataaggagattagatttcattctgaggcatgagaaactgttggagggttttacctaagagtgggacacaacctgagttgctttcctagagatcactctgctttgtggagaatggattggcaggggcagaggcttactgtgatccaggtgagagaggatggaggttgggactacactggtggcaataaaaaaaatgcaaaaaaaaaaaaaaaaaaaggcagacagatttgaagttttagatatatctccaaaatatattatttgcagctgtgctagatatagaagataagtgtgaggaagaaatcaagggggtttccacatttcttacttgagcaacagggtgggttggagtactagctactgaatggtgagggaaaggttttaaacacagaaagcttgtgttgcctatgaaatttaaagtggaggtggcaaataggcagttgagaatctggaactcagaaaagaggtctgatcaagcaaagcaactgtgggaattgctagcatggcatttatatttacagtcatctctctgatcagattaactagatatagagaagagtgccaaggacagagccctgaggaattcccacatttagagatctggtgttggaagaggaacagatagtgagggaaactgagatgggcagacgagatagaaggaaaatcagaggagtgtttcgttgtggaaagctaagagaggaaagtgcttcagagaggaaggagtgatcagccagtctgaacactcattttaaggtgagagccacataccacagtatgtttgaaacttaccattaacaaagaagcgtcatgtaatgtcttccatctctaaaaacaaaaccaaaaaaaacccatctgtccacctcactcacatctccctccatctgtcattcctttcctctgcatcccttaatgttaaaagtccccacgaaaggacccagtgtctcactgtcctttttctatctttatttcactccatttaggctttctcacccatattcaactgaaaatactcttggaaaggtcaccagtagccaccgtcttgtcaaatctggtttcacttctctgtctcatccttcttaagtctgtaggcagtatttgattgaattgattgctccctccttgaaaaactctgctcttggcttctatgacactacattcttagattaacctctcacctcatggctactgcttatgggtcagtttagcttttaacagaatgtaaatccagttatatatctcctctgttcaaagcccttcgatgacatagtgtttctcatcacactcagaattaaatccacaatcattacaatggactcccaagtcctaagtctgctggcttttgcccacctctctggcatcttatattgaactggcctttgtgctgtttcttgaacctgccaagctcctgagagctaccatgcttgctgttcccagtgtctagaaagctcttcacccagatctttgcgtggttcacttcacgttatttagagctctgcttgtatattacttcctcagagagaccttcccagaccactgtatcactgctccccaacctgtcactttctctctccccaccctgctttttattcctcatagcacttgtccctgtctaaaattaagtattgacttgtttataaacagtgtcttccttcctccccacagaatggaagctttctatcacttgtctccttgaacacttctctgttcctagtgtctcaaacaatggcatgcaattgctggcccacagatatttgaatgaatgctgctaaaaggttgaatcagatgaggatgggaatgttcctgttggatttggcaatatgccatttgttggtgttctggctgagcagtttaaacagagcactgagggtgggagtcagggcaaatagattaaggagaacctgaaggtaaggaattagacaagacgaattagacaactgtgtttcggaaagtcagctgagaagagagacgcgaggctggtggtagctgggggagggtaaatgaggtcaagaagacaagtctttgagttgacagcagtggatgtaatccagagcacacatgacaggatggaagagacttgtcttcccttttagcaggtaggaaaatggtgaagatagttaccaagccactctgatggtgtagttcatggagtcgggtggagggtgagagtggaggcggatgagtcagtgcctggccagctgcatgagaaaacaaggctaggtattgggtgaaagggagccaggccctgtggaatgaggtgggattgccatgtcttcaaaccagatgttgccatggttggggtcctggcaaaaggtgactaagggagcagggtgtggaaagaggaaaaaagaagcaaccagcagttttgttacatggtggctgaggatctaataatgtctccttgttttattttatttttatttagctggtctcaaattcctggcctcaagcaatccttctacctcagcctcccaaagtgctgggataggcatgagccgccacacccagctgtctccttgtttgtttgtttgtttgtttgtttgtttgtttgtttgttttgagacagggtcttgctctgttgcccagggtggagtgtagtgtacaggcccggctcactgtaatctccatctcctaagctccagtgatcctcctacctcagcctcctgagtagctgggactataggcgcacatcaccacaccggctatttttttaatttttagtagagatggagttttaccctgttgccaggctggtctcgaataccttggctcaagcaatccacccgctttgtcctcctaaaatgctaggattacaggcatgagccattgtgccctacttgtctccttgttttaattaggaacagtattctctgtgcccggaaaccatttgggtttatgataggaaaactgtctttttcccttcctctcccatcttcctctagatggaacccattgaggctgagagagtgtacagtgttggccctgcatacctaacttgccatcagaattgaatgtgttcatgcctccagatattccagtgctttttatgtgctaagtactgttttaggctcaaaggatatagcagtgagtaaaacaaagtgtctgcctttaaacagcttttattctaatgcagggagacagagtaaataaatgtatgatagtcagagatggggtgagcatgtcatcctgggccccatgctctctccccacctcacctcaatagccctggcatggcagtgggaggtgcacactcatactttcttctctgtttccatttcctggcatctgcagaaggactgaatgagctcttcctcttcagggtgttgccctgaatggctgacttaagccctccattgcacaacacagtaatgacttgttctgttgtcttgatttcagatgagacaccaattattgcggtgatggtggccctgtcctctctgctagtgatcgtgtttattatcatagttttgtacatgttaaggtgagcctactaacacttcacattctcttagattctgtttcaatatcccagtgtcccaatgaacccacacagtccagtagacagtaggatatacacaatgaataggatagagggggaatgacccatgatagtgctaaaattgaagttctacttagaaattatttaaaagctctacatagtcttccttaagtcctaagccctccctctttcttccatctgtccaagcccagtctcccaactccagtgcaagctaaagcccagaatggtagtttggaggttgaggtaagaaaccgcagtttgttattagtgacaggtgttacaggatctctaggtctagccctgctgaagcaacccctaaaagggccccagtaagattacatgctcaacaaaagcctactgtatttctggctggggctttgtccccagacccttctgggacccctggccctggcatgttgagttgagccatgtgagttgtgagttacaggatccctctttctaaccttctttcagggtcctctagacgttaccactcaagcagaagcaaggaaggggaacccaagggagagaagagggtggtgcatttattctcttcctgctaaagctactgccctgactaattggatttagccctgccttatctttggcctaaccaaagatgttctgtgctccctctgttcttctgcagggataaagagagaggaatcatgtgccccctataatttgtcatgtgtctctatcattctgcaggagacttgtggccaggactgtgtccacccaatccaaagctctgggcttctccctgggtctcccaggctacactgaggaaataccaagatttttgtttgatatatattgtctgtctcccccagctgtattccacccactcaccctctctctacctggtgtggctgtgctctgcagtgagccacatgagcctgaatatactgttggggttccctggttggattccagtgtgccaagggtaaacaggagtatcccgaggtactcggtcaccccagcatgctgctgcctcagggtgtgcatgacctgtctctaaaaaagcccgattatttttaaaggcgatttagaaaggctgaattgatgagcaggaatacagaggtgtgatttgcctctcccacctctgtgctccattcttcactgtgatcattttctcattaggtttaagaaatacaagcaagctgggagccattccaattctttccgcttatccaacggccgcactgaggatgtgggtaaggcattccttaatgtcatggggaaccttcacaaggaaggaaatcaagaaattaggagtttctccatccttttaaaagaataagacaataaaaagaggaaaaaagatttttgaagaaaacagtcctagttcttacaggcttggtccatgaggtagaaccccgtttagcctccagaagaggggctaggttctcagggtacctgactgaccttctcccttgtgtactgcagagccccagagtgtgccacttctggccagatccccaagcaccaacaggaaatacccacccctgcccgtggacaagctggaagaggaaattaaccggagaatggcagacgacaataagctcttcagggaggaattcaacgtgagtactttgttgaggctggtgtatcagcagggaagaaggcagacctaaagtcagacctttcagatctttggagtcatgaagtaaaaaatgggcttttaatgtttaagaggtgagaaatgttttaccaagtttatctgactccctgtatgatcatggataggaaatgaagtgagatttgcctcacctccctaatctacccatccattcagtcatcatcacatctcttacttcttttgtttaataaatacttagcaagcatctaatatttgtcaggtaatattctagttgccagtgatatgatgaggagcagaaacagatccaatccctattctcaaggaactcactgtccaggagggaaacctcacaaacaagaacaaatataactgtgtaagttcaaacagcagtacagcacatgaaggactggtgcatatttgtaggcatccatattaagaggttgcctttttgagtctagagcaggggtgtcagtgtttaaagtagacagtgggatagatcagtgtgggaaatgacgaccatgggagactgcagagcacaggtctcatcttgagtatttagattcacattttttataattcccacaaggaagcagaatatgtttttaatccaccagttggtgatcctagcctaccagttctgatcccagatcagaagagcttctggccagcacggtgactcacgcctgtaatcccaacactttgggaggctgaggcgggcacatcacgaggtcaagagatagagaccatcctggctgacttggtgaaaccctgtctctactaaaaatacaaaaattagctgggcgtggtggcatgtgcctgtagtcccagctactcaggaggctgaggcaggagaatcgcttgaacccaggaggcggaggttgcagtgagccaaggtcacgccactgcactctgacctggcgacagagcgagactccatctcaaaaaaacaagagcttcctcgaataaatgatattttaattgatacctaatcataggcaagggtggtggggacaggggattggggagccttccagccactggaaatagcaggagaattgtcaggagtgagtgtgctgaaggagggcacacccagaacatgacagggctgtgtgcagctgaagaccagagcttcaaaggaggataagaggtgaaactagtgtggccagaccacagaccttgcagatagtcatgagagaagtggcaagccatagagcagccagatttacatcttgaaaaaatgactcagctgggcacggtggctcacgcctgtaatcccagcactttgggaggccaaggcgggcggatcacaaggtcaggagatcgagaccatcctggctaacacagtgaaaccctgtctctactaaaaatacaaaaaattagctgggcatggtggtgggcacctatagttgcagctactctggaggctgaggcaggagaatggtcagaacccgggaggcggagcttgcagtgagccgagatcatgctactgcactgcagcctgggcaacagagggagaccccatctcaaaaaaaagaaaaaatgactctggcttctgtaaggagaatagcccatgggcagaccagaatagttgcgggaatacagttaggggttacaggtgttaatatcagaagtgctagtagattgacctaatgtcatgactaggaaatgggggatggatttaaggacacagaggagcagttccagagttggtaaatacatcagctggggcattgctaaaccatcagtttccttcacaactttccactaagccatgtgtcagctttgccttataggctggctccttttttatcagtgggaaaaattttcccaaaagcttctggagacttctcttgtcacatgctccttcttaaaccggtcgtgagcaagggagaaaataaggttactgtggttggctgagactagtccagattactcctgggtcaaggccaggcatgctagctcacacctataatcccaacactttgagaggctgaggcaggcagattgccttgatcacaggagttcgaaaccagcctgagcaacatggtgaaaccccatctctacaacaacaacaacaacaaaatacaaaaattagctgagcatagtggtacatgcctgcagtctcagctacttgggagatgaggtgggagtatcgcttgagcctgcggggtggaggttgcagtgagtcagattcactccactgcaccccagcctggacaacagagccagatcctgtctcaagaaaaaattttttttagatattcatgtgggatatggatggataacctcacagaataggaggtctggtaaaggaggaatggttattgggtcagtgggtcaccattcatatctgctccatgacagaagggcttagggggagtggtgagtgatgtcagatttgcattttgagaaaataactaactacaatatagagaatagataaaagggagaggcaagagttgaagtgggagaccatttaccaggcaagagttaacagaatagcttggaccctttttgggggctattggaaaaatagcaccatttaatgttcattattgattgataagatttaccacatcctgccaggcacagtggctcacacctgtaatcccagcactttgggaggccaagccaggcagatcacctgaagccaggagttcaagactagcctggctaacatggggcaatcccatcccatctctactaaaaatacaaaaattagccaggcgtggtggcacgtgcctgtaatcccagctacttggaagtctgaggctgaggcaggagaattgcttgaacctgggaggcggaggttgcagtgagccaaggtcgtgccattgcactccagcctgggcgacaagagtgaaactccatctcaaaaaaaaaaaaaaaaaatttaccacatctcacaagacagcactccagcctcagtaccatagctggatctgtgctaggcattgtactgttttgtaatctataatgccaactgcttctgggtgatggggtatgtgatcccattactatactttttttctgacaaattagttcttttctttttccataacattaaatttacataagcatgaaacgaattatttgtttggaggtaatattccctgagactccatggtaaggtatttcagtaaatccctggatggtgatggtattcctggaggcatgacaggtaaattcggatagatattgtggtgagagccatttgctgtgctaccatggcaaccgtgttcacgagctcattgggccagcactagggtagtgagggaaagggctgaccatcatcacctgggtttctagcaatgagtgccatcttgtgagcattcacatggaacataaatattttctttcttgtgctagttatccactacccagcgattggtttagatcctgacttccagtgagataagtggtgtgataatttgcttgaagttctcttcactaggagaatttctcttttatacacattcaaagccatcacttaagtagtataccccatagcagtctacttccagcccagcatgggccagcatgtttcaccaagcagtttatataccaggccggactttttcttcttcagttaactgttgatgtcaataggaagtcagaagtatctattgcggcagtgggttgtgtggtaggcattttatagagatcacttccagctgataatgggattctgctgggcatgtccaaatctatggctaattgaatctcataatacctagtttacgagaccggcccggtggctcatgcctgtaatccctgcactttgagaggctgagttggacagatcacctgaggtcagaagttcaagaccagcctggccaacatggtgaaaccccgtctctactaaaaatacaaaaattagccaggcatggtggcaaatgcctgtaatcccagctactcgggaggttgaggcaggagaatcgcttgaacccgggaggcagaggttgcattgagccgagaccacgccattgcactgtagcctgggcgacaagagcgaaactccatctcaaaaaaacaaaacaaacaaaaaaacccctagtttacgatggggagttgaagtcatttggatacctgtctgtgatcaggcttgcagtctctaccctagagcccagtactaggctaggagcatggtcttaccaataggatcatggtcttatatccatatccaaatattacgattcttctgtttaccttactacaaacactctagagctccatacaatctaccagagcttatttctctgtggcctggatcagcaggagcactttctcttttcagatcactcaataaattggtcagaggctgggcacagtggctcatgcctttaatcctcgcactttgggagatgaggcaggcagattgctttgagtccaggagctcaagaccagcctgggcaacatggcgaaagcctgcctcttcaaaaaattagctgggcatggtggtatgcacccgtagttccagctactggggaggctgaggtggggtattgcttgagcctaggagtttgaggctgcagtgagctgtgattgcaccactgcactgcagcctgtgtgacagagcaagatcttgtctctatgtaggtaggtaggtagattgattgattgatcagatggattagatggattaaattgagagatcagagttggatgcaaggataaggtatctgctgtctccaaaactcaaaatggcccagcaagcattgctcctctttgttagcaggagaggggtggtggggcaaggggcaacaagttgtcttttatgttggaggagataccctgacgtgctgcaggcctttgactttcagaaaatttggctgaggtggcaggccactgtatttttatgtctgacatgtacatctaagatacataacttcctgcttttcatgtctcacattgatgtcattagcatagttgtcaaggtaatgtcctgtgaaacagacaaaatcttgatgaaccagatcacaacacagaaaggtcaagatgatttatcactgaggctgctcttgccatgagcaagaaaaactgcttcaagtagtccacacaacttaaaaagaacacacacttacccctagcagtagtctaggtaccaggagttatatgttaatctgcagaaagtagagtacgtctggaaaagtaactgcaaatctgcaaagtcttctgtagcacttaagatcctgcggttcacatggagacttcgccttttgctaaagagatcactgctctaggagcttacatttgctctttctgtgatggttcttatccagtgggctagggaatctgtgtgtctttgggcattacctaatggccaatgttattgaaaatcaaggtggcacagagggaggtctagccaacttcacagagccgggagcatctagtttctttccctcccttttggaggccctgacagacaggcaggcaggcagacagacagatcgacagacaggtaagatagattagatagattaataggtcctaatgtgaagccacctcaggccaaaattccttccatcagctggcctgcaaaggctccgttctaactagcatatcttagcgacattctgagttcctagcaagtagctacctcaaggccaggacctagcagaccccaaaagatgcatttccctttacctagtacagttgccatggcaaatatctgcagattattaagaaaagatgaggagggaggtttataatatatgtgtgttaatgcgctgtggcagggttcctccttacagatgcctggcctccctgttattgaagggttctgggtctgaaatgacccaggcctacgagttggatgagggggccccctctctagcatggtggtctagtaggctgcctaaactgacctggaaagctactttccgtttccattactgggagcttcacaatgaattattcacagccataaacgtctgatcatggtctccaacagtctttctagcccacttagatcaggaatcccattttgaaatagtcccttccactagcatctcacgctgctgaggacagccaggaaagcacttctgaaagattccagtgctttcctcaccagtgtatagcctcagcaaggcatgtgatgtggatcccatcaagggcatactgaaggtgtcagtagaaggctgagcctttagagtccatatgccactctggtctcctctactttgtgcccaggtttttctggcttttcattatcacctcactaaatccagcattcagtccaggtttccactggcgagcctagctcaacattaaaaccatggccagttacctgagctgttacactacctgcagaagttcttttgaccataccataattagaaatttggctttatccaggctgggcacaatggctcatgcctgtaatcccagaactttgggaggctgaggcaggcagatcacttgaggtcaggagtttgagaccagcctgaccaacatgctgaaaccctgtctctactaaaaatacaaaaattagccgggcatggtggtgagtgcctgtaatcccagctactcgggaggctgaggcaggagaatcgcttgaacccgggaggcagaggttgcagtgagccaagattgcaccactgctctccagcctgggggacagaacaagactccatctcaaaaaagaaaagaaatttggctttaaccaagtcatactctcccttccttgttataacgtctccaaaatctatatcaacaattgttcctatcatttgtaatgatccagctcagtgaattcctgtagtttcttctggatatttattagctctttactttttttcccccgctgtagagacggggtcttgttgtgttgcccaggctggtcttgaactcctgatctcaagcagtcctcccaccttggtctcccagagtgctgggattacaggcatgagctactgtgcctggccagcattttacttttctaccttatttatgcattttaccctcaggtcatgttatgcttgcattctggtaatgtgtgggcaatgcaggctgggttgtggggcagttttcatcatgacagcaagatgcagtagagagcataatagagatttttggaaattaactttctttgggtcctctcttttatcatcatttctgttgtctcacttaaagccttatctttctcatgagcaacccaggaaagatgtgaattctgtggcattaaaattcagcaactcgcaaaatttggaaaccttaacatttcacttagcaaaatacatatatagtaatgtaaaggccctgagtcttgggttttcatttcaaggtgagcatttgatattggagctgggttatttcttgttttgttctctaatattgtcagaagtaatcctactccttggtttcaacatttcccctctccttttaattgggacacccctactcgtttaccaccagcttgaacacatcacaggtaattgcaagcaataactaaaatagtagttgtgcagctatgaactgtgagcagcttgctctttcccatcctggcaattggttgtcagtttctttccttccatctgaacccagtaacatcacccacgtttcccctagcagtctctcaactacaacccactctgatagtaattgctaaatcagttaaggtcctctagttaaaagcaagagaagtcacctcaactaaattaagcaaaaacaaacagaactattgatttgggaagacactggaggagctggcagaatcagaaggtaagttggagtaccaagtctcaggtagagccgaccttggtggctttggggcccttctagggaagcccctgcttcttcctagttttcaaaatcctgggagagaatctgattggctcagtatcagtcaggtatgactgtgtttggatcagtcagccctgggagagaagaggagaaataacacatagggcaaacaaaccaatttgtgtctactgtcatagaataatatttttagtaaccatcagatggggaaggcctttctaagctacttagaagatttagatgccagaatggaaaagtttgaaagatagcaaatatattaaaatgtgaaacatctttgtgacaaatgatgtcgtaaaaaagtggccaactgggagaatctatttgccataggtagacaaagaatgttccagaatatacaaacctgtgagtaaaaggtaaacaatccagtcaagaaactggcaatttacagaagaaatacagatggtctataaagatatgaaaagaagatcaactatatctagtaatcagggaaatacagattaaagctaaccattattttggacctatcagatttgaaaatttaaaaagctttatatcaaatgtggacaaaagtatggggctgcagagacttacaggtgggggagtttaaattggtattgcattggagggatgattctggcagtaccaatcattatttaaatgtttgagttttctgaccaagcttctgagattcttaacagaaaaagccatgtacaaagatgtttatgacagcattatttataatagcaaagaagataaaaacgcaaatatctgtcaaatagaatggccagatgatttcttatatccattatgatattctatactatcattaaaataaatgtgttcacatagatctctaagttatattgttatgtgagaaaacatatgtgggataatttcatttttgttttcaaaaatatgtatatctgtgtgtgtttgggtatgttaatgcttttttttttaagtctgaaagactacaaattgtcaacagtggctgcctacaagggggctggaagagaggagagacataatagggaactttgttttctactaaattatttgacttaaaacaagcatattctttttataatatttttaaagcagatttttttgaatatgggaaataaatctaatggacttagtttgcttcgatggatatataacatctagaataaagaagttcctatgcctagtttgaactgtgtcaggagtcttgtggtcaggtctctataaaaagggatatcaccaaatgggatgttgttctggagagaaactggaccatgggggtgaataactaaaggaacaacactcataggacatgacagctgttttcagatatgtgacaggctaaaaggagactgtagcatttccgtgaatgcccacctgattagaagttctaggctgtggctttcatcctaattacaagctggagcttttttgttcaccagcatttgtctttctaggaatcattgaatttattcaaaagaaatactttgaaaaaccactcagaagcccccattttcagggaaaattgaggtctttaaggcattatcaaggtttaaaaagaaacaaaaagataaaattgtgttagcttctggctgggtgcagttgttcatgcctgtaatctagcactttgggaagccaatgcgggaagattgaggccaggagtttaagaccagcctaggcaatgtagcaagaccttatctctacaaaacaattttttttaattagccaggcgtgatggcacatgcctgtagttctagctactcagggggctgaggtgggagaatcatttgagcccaacacttggaggctacagtgtgagctatagtgctaactttatagagctgcaggagctacagtgagctacagtgatcaccgcactgccctccagcctcctggctaccagagtgagactctgtctcaaaaaaaaaaaaaaaaaaaggcttagctcctgagaggaatgggataggagagaaagaaaagagggaaagaggtgaagccagtgaaatagtcagaatctgtgcgatgtgagatgtgaccttcctcaggacctcacatctcttagattgccaggtgaagaaggcatgtgtgtgtcactagtgatgggactgagtgtggcatctgagttgagatgggtgaaatcgcctctacattgatgagttgtcccaaaataagtgaatcagagtcacagtcctgtgggaattagcaggaactgtgacaagggctttggaattccactgtccagagagttgggagtttgcgttttgcaaggggcagaaaagatgcccgctgacatctgggttttacattgcttagtacgagggaaatgcaaaagaaattgtgtgtctgggtgttgggtcgttttaaacagaactgttccaagacctaccttggaaggtagtaaatttcccatcactctagtgttcagtcactggtgactattgggtgagagtattgaaaggagattcagacttaaaagtgaatgagattcagacctgtactggagatctaggcaagaaaagaaaggtataaggattgcaaaggaagggacaaaatataaatttttcacagaccaaatactgtcttcagaaaaacccacagattcatcagacatattatagaattaatatgacatattatattatagaattaataaatatgacatatttataatttattatatatgacatatttataattaataaatatgacattatagaattaatatgacatattatagaattaatattcatcagacatattatggaattagcaaggttgctagatacagaagcagcataaaaatttaatgcatttctatacataggccacaaacagaaaacctaataataccttttaaaaggtgccaattacaatagcatccaaatgtaaagtacctaggaatggatttaacaatttagagaaaattattaaaatgtttgaagacattaaaggaaaatagcttaaattagtgaagagataggatcaatggattaggaggctcaattttgtaaagatgtcaattctcccccaagatatatagattcaatgcaattccaataaaaatcccaacaggtttttttgtggaacttgacaagctgattctaaaatttatatggaggagaaaagattcaagaatagccaagacattcctgaagaagaagaacaaggtgaggagacctgccttaccagatataaagagattataaaattttagtaattaagacagttttgtattggcactgggatagacagatcgaccagtggaatgaaataaagagcccagaagcagatccatttgtaagtggaaacctatttatgacagaaatgctcttgcagtttgggtggggaaaagatggtcttcacaataaatagtgcctgggaccattggtaaccctgtgggaataaatgaaattgaatgcttgtcacatatcaaacacaaaaaccaattccagttgctgtaaacactgaaatttaaaggacaaaaatgataaaatgtagagatcataatgtagtaaaatatacttctgatctcacagtaggaaaggatttcttaagacttaaaatgttgataaaagggaagattgatgaatttacatgaaaatgcaaaacctctgttcataaatgataccataaagaagatgaaagggaaggccacaaccttggtaaaagataacacaggtaactgataaaggaagagtatccagaatatataaagaacttctacaaattgttaagaaaataagtaggctgggcgcagtggttcatgcctgtaatcccagcactttgggaggctgaggtaggcggatcacaaggtcaggagttcgagaccagcctggccaacacggtgagaccctgtctctacaaaaaaatacaaaaaaaattagccaggtgtggtggcgggcgcctgtaatcccagctacaggggaggctgaggaaggagaattgcttgaacacaggaggtggaggctgcagtgagccaagattgcgccactgcactccagtctgggtgacagaacaagactccattttgaaaaaaataatccagtaggacaacggggaaaccacttgactaggtacttcacggaagaggaaactcttttgaccagtatgctatggaaagatgatgaacctcattaataatcagagaaatgtaaatcagttaacacaaagtctgacagtagcaaatgttgataagcatacggaactggaacactacattgctggtgggagtataaattagtacaacttctttgaaaaacaatttggccttatctggtaaggttaaagatacctatacctgaaattcttgcacatatgcacaagaaagatacaaaaatgtgtctcaaagcaggacctttaactgtaaacaacccaaatattcatcagtagtagaatggataagtaaattttaacaccgtctcaaatggagcactacaaagtagctgaagttagcagccaggatgaatcttaggaacgtaatgttgagccaaagaaaaaagcaactcaccacttaatcatgattccattttcctcaaaaactagactagcaataataatacattgttttggatgtaaaaaatatgagatacaaataaaggaatgtaatgataattataaaacttcaggtttaccagtgagaggggaaggaagaggatataaggagaggagcccaaagagagcttctaagttaaattatgtgatggatactttttaaaaaataaatatcaacaaatgtgaaaaaaaaatttttttttaaccgacatgtctttaaaaaatgaatgagtacttagccttggttccagttaaggcttaaacaagagatgaaacggtcttcgatgccacctagtgtttctagagagtttaacattttatagacttctgctctagctgctccttcctagctctgtgagctaggtttttcagagtagaaaccaaaaggagtaggattcaccttgttttcatccgtgacgcaggctcttcattctgaacctttgcatctagcgctgtgttctccagggcaagccctttcttctctcttgttaaacaatggctcctgtttcttcctgactctttttaggagccttagtccacctggagacctagtttttctttatcatgactgagggagctagggatgctgatagggctgtgagatgtagtctttgttattcctgacatttttgtattgaagactgttttcaagagtcttgctgtccctacgtctgttctacattttagagaagggatgcacaggaaaactagtgcctctggattagccatcagggcttaaaaaactgacatctcatcctgccctgtacttgggtggaaacctgtggaaatcttatgtgaaggaagagaatgcaaactgtgggtgaactgagaaattctgatctaaaataatggtctctactgcgtgtgtaagagtccagcccaggaaaatcttttcttccttttgtggtattcacagcatagggtcaggggtaattgcctctgttagtaaaataacatgcagaacctccagggttttaatctgaaaggaaatctcttgagtaggtgagggcagatggattttgaggtcctaatttccctatctttgggtctttcactttaatttctcctatcactgtcatgctggtttccagtaaatatatttgctcctttcttaaagctcttgcttcccagcctgggcaacatagcaagatccacctctacaaaaataaaaattaaaaaattagccaggcatggtggtgctgtgcctgtagtcccagttactcaggaggctgaggcagtaggatacctccagcccaggagttcaaggctgcaatgagctatgatggcgccactgcactccagcctgggtgacagagcgagaccctgtctccaaaaaaaaacaacaaaaaactcttgcttccatctgacaaaaaattggttccctttgggttggcatttcctttattcagtctttttttaaattattatcaaagacagaaacgttcattcttcatttctgcctcttgctcttcccagtccacttttgccttcattccatctccaaatgtagtaatttttttttttttttttttttgagacagagttttgctctttctgcccaggctggagtgcaatggcgcagtcttggctcactgcaacctccatctcccgggttcaagcagttctcctacctcagcctcccaagtagctggggttacaggcatgtgccaccatacctggctaattttttgtatttttagtagagatggggtttcaccatgttggtcagctggtctcgaacaccagacctcaaatgatccacccgcctcggcctcccaaagtgctgggattacaggcgtgagccaccgcgcctggcccaaatgtagtaattctaattccagaatatgtctcaaatgcatccatttccttgtatcatcatttttccatgcttctcttcttgctcctctctagtccattttccatacaataacaagtaattctttaacatggaaaatggatcacactttaaaaaccttcaatgatttccttatgcacttaacataaaatttgaactccctattcaaggacctacctggaaatggatgatctgactttgccaggctcatctcttcctacttcctcctgccatccccatcaacctcaccttctgcgtgatacctgcactgattttcggttcctcacacaaccaagccttcttccacctctgggttaccacagatgctgttctctgtgtctggaatactattttctatactcatccttcctcagagagacccacctgtaatccaaatttggtgctttctgatacttcatctctagtagcattctgttctttgattgcattcatcatggtatataattatatatgtatttgttttatttgtttaatgtctgcttttcacccacaagtttatattgtccttgagggcgagaactgcacttatatttgattccccactctttgctctgtatctagcccagtgcctggtaggtacaaaatatatatttgttgaaagaatgaatgaaaagtaatgcatgaattgttcctctactgctgaatactacggttgttctcagttttgggtcattctaaataatgatgaagtaaataattaggacataaagatttttatttcctaagggtatgttctcaaaattgaagttgctaggccaaaaagtatttttgaaaagtttttttaaggctcataaaatgtaatttccaagtcacttactcggaattagtgttggaattttaaagtgcctccctttttgctttcttgtttgtttttatagtgtcagagtctcactgtgtcactcaggctggagtgcagtggtataatcatggccttgaactcctgggctgaagtgttcctcccacctcagccttctgagtagctgggactacaggcatgcaccaccatacctggctatttttttttttttttttttttttaatgtagagacgaggtcttgctgtgttgcccaggctggtctcaaacttctggcctcaagtagtcctcccacctctacctcccaaagtgctgggattacaggcatgagccaccacacccagctccttttttcatccttaattttgaatatatgaaacatacaagaggagaacagatcaaataataaaatttagcttcccactctgataaaactcatttatttgaatacttattctttgctacacatgagattatttccttatgtggcagatgttgttgttccaattttatgtatttatttattatttatttttgagacggagtctcgctctgtcgcctaggctggagtacaatggcgtgatcttggctcactgcaacctccacctcccaggttcaagcgattctcctgcctcagcctcctgagtagctggggttacaggtgtgcaccaccatacccagctaattgttgtctttttagtagagacagggtttcgccttgttagccaggctggtctcgaactcctgacctcaggtgatccacccgcctcagcctcccaaagtgctgggattacaggcgtgagccacttcacccggccccaattttacagatgaggaaactggacctagaaattttaacagatgtgctcaagttcatacaaacacagactatctcatgtcagatcattgtgtgataacctccctgcactaactaatctacatttgctccagaactgctgcaaatttaatgtcacctcacccaaatcttctgcttcttaactgctgcatctatatgaatgccctcccacccacccaccagtccttgcttccttgccacatgatgctagaggctggggtgccatgcccccttagatccctaggaagagattaaatcagctggccatccagaaccttcctgtgtggttcactctgagatgcatgtcatctttgtgtggtggtaattagcatgaggataaatggcccattccttcaggtatgtccccattccaatttacaagggtaggcccttttggcccagtatcataacaacaggctgctaaccacatagtaatcatggaaagagcatgctatacttacataacagaaagggcattctgccccctgaggattcttgtgttgttgaactctaaggagcttgtggctgtttcgggggagaggagcattctctgtgttaggctgcaggtattcacctgggcccatgtttttccccccaggaaaaggtagaacatgctaccaggtcagggtttggtgcagcagtttgcatgtttgatgtttatccctgctaataattcctctaatttctcttaacctttcaggctctccctgcatgtcctatccaggccacctgtgaggctgcttccaaggaggaaaacaaggaaaaaaatcgatatgtaaacatcttgccttgtgagtgtctttagtgtttcttgggatgtaacctgaaattacatctctggagggattttctgaagatggaaagaatcttgcaattgggcacagcagggtgaataacaagagtgcgttcatggcagtactcagtggctcatacctgtaatcccagaactttggaaggccaaggtgggagaatctcttgagcccaggagtttgaaactagcctgggcaatatagtgagacctcatctctacaaaaaccttaaaaaattagccaggcatggtggtgtgtgtctgtcgtcccagctactcaggaggctgaggtaggaggatcccttgagcccaggggggcagaggttgcagtgacccaagatcgtgtcactgcattctagcctgggtgacagggcaagaccgtgtctcaaaaaaataaagtaaaagaaatgaaataaataataataaataagataaataaataagagtaggttgaagactttgggctgaaagagcctttatggatcccacatactcagagtcaattaggatgatccaggaggatttttgtgtcaggcctaaagtttctaggaggtcctggagaacagcttcactaggatcaggcaggaagcagggggtaatggtggtggtagagatggttttttgtggtattcattgaaagaaattctaatgcagagttctctgtataaacccttcccagagttagccattgctaatcagttgatccataagctaacagacatttttctagtccattggtatccagaatgggatatgcataatttaatgagatatgagaggaagatgtttgaacctcacttgatttttatatttgcttttcaaaaaaaaaaaattcctaatcctcagaacctgtgaaaatgttttttttttaattttttgtagagatggtcttgctgtgttgccttggctgatctcaaactcctggcctcaaacagtcctcctgctttggtctcccaagtgttgggattacaagcatgagccagtgagcccagccagtatatttgccttttaaaaattcatccttttaaattttttatttcatttatttttttagagacagggccacccaagctggggtgcaatgatgtgatcatagatatgtatcctcgaattcctgggctcaagtaatcctcctgccacagcctgctgagtaactagaactacaggtgcatctaccatgcctggctgattattttttagacacagggtcttgctgtgttacccagcctggtctcaaactcttggcctcaagcagtcctcccactttgacctcccaaagaattgggattacgtgcatgagccaccacatctagaccctaaaaattttatatttcagggtatatcatacattagcatatgtgcataatttatcaataaatgagcatgtattagagatgcctgctcacatttttataagtgaagtatggaaccaaaaaattaggaccactacactatgcatttacagatacttttgtctttttcttttttctttctcgctctgtcacccaggctggagtgcagtggcacgatcttggctcactgcaggctctacctcctgggttcaagccattttcctgcttcagcctcccaagtagctgggactacctataggcacatgccaccacacccagctaattttgtatttttagtagagacggagtttcaccatgttggccaggctggtctggaactcctgacctcaagtgatgcaccgcctctgcctcctgaagtgctaggattataggcgtgacccaccatgctcggccttgtcttcttatttatgtgcacatgttggaggagggggatgtgtgtatgtgtgtgggtgtgggtatgtgtatatataatacatattttttaatatgattggtatactgtacacatttctctcttttaatagtatatattgtcagttcatctgtcaagaaactttcttttttctcaactacttagtattccacattgtagatgcatcttaatttatttaactagtcccctaatgatacttaaggtattcccaattttttgctgttatactgttggagttatattgttggagtggcatctttatacaagcgtgagtctgtgcacataggcacagatgtctcaactgtcctggttgcgtcaggttctgtgagaaataaattttgattttactgaaatattgttggtttgtttcctagatgaccactctagagtccacctgacaccggttgaaggggttccagattctgattacatcaatgcttcattcatcaacgtaaggatcgggtgctttccctgtcacttccctgcctgaccattgccactatctgttggctcctccccagctgtgtgttaggagaaatatttgtcatttcatgttttccctgacaagtctggtttttttaagtgactgaatttttttttaaggtcagtcaaatagttttaatcattttctatatttaccctgtcgtcattccctatggtttcccatgtagaaatctgtgtctaaatatgtattttgtgataagagtcagtgaatcctttattgagctgattctaattacaaacaaaagcaggccttgccctcaacagtaaaaataagggagaacaggacaagaatacctgacatgacaccagctatattatatatgtgtgtgtatgtatatatgtgtgtgtgtgtgtctgtgtgtgtgtatatatatatatatatgactatctggttagccatatatgaaccaaggcctgagggaagagctgatactaagaggaggtttttaaagatgatttagagaatgtttatagaacagtctgtatgagagatttgaggtttttgtttggttggttttgtctttggcagtagcctgaaaaaacacataaagagttaagaatatgttttataggtttgggggaagcatcctgtagagagagtgaatttgaacagaaaaaagagagagggaaagctggcaaaagcaagtctgactcctgatgcaaaatgcatgagaagactggataaaatttccacttgcatgtttatagcagcattaatcctaaaagccaggtgggagcactccaagtgtccattgacggatgagtgaataaattaaatgtggtacatgcatacagtggaatgttattcagcctttaaaaggaaggaaattctaatacatgctacaacatggatgaacctggaagacatcatggtaagtgaaataagccagtcacaaaaggacaaatattgtatgattctacatatagaatataaactatatatacatatgtagagtagtcaaattcacagggacagaaagtagaatagtggttgctgggggagggaggaatgaggagtgggtacagagtttcatctggggaagatgaaaaagttctgtagacggatggtggtgatggttgcacgacagcgtgaatatacttaatgctacagaactgtacacttaaaatggctaaaatcagccgggcacggtggcacacctgtaatctcagcactttgggaggccaaggcggtggatcacttgaggtcagaagtttgagaccagcctgaccaagatggtgaaacctcatctctactaaaaaaaaaaaaaaaacaaaaaaaaaaaaaacaacttagccgggcgtggtggcaggcgcctgtaatcccagctacttgggagattgaggcagagaattgcttgaacccgggaggcggaggttgcagtgagccgagatggcgccactgcactccagcctgggcgacagggtgagactgtctcaaaaaaaaagaagagtcaaaatggctaaaatcgtaaattttatgttgtattttaccacaagaaaaaaaaaggacactgatggagagattagtgtgaacataagaagggctgtttcttcctctgagagtgaagataaaggagaggacagaatggatagagacgactcgtaggtgtgggtaaagcaagttgaggcaactcacccgtgtgctcatggttgtgtactgaacaaatgagatgggactgtgacatgagagcttcgaaagtttagaacagcttctgaggtccctgagaaaaggataccaaagagagaaagcaaaggacatgtctagtgggatgtcattgatgggggtggggggtgctgagttgtgtgattttttttttcttcatctgcaccctgggattggtggtaaatgcagaggacatgtggtactcagacaaaagggaaggtcagtggctgcttcaagtagtcagccaagggcttcagtttcagtagaaaagaaaagcgttaggaagttgttaggaataaacaactattcctaaggtggtaggattgaggaactggagatcttgagaaagtgaaagaacaggaggttgtgtccaaaaaataggctattagatggacttcaaaaatggggcagtccgggcattctcactggagtgaatttgctgaagttcctgtatgtatgtttaacattaatggttacatgtttgtagttttaaggaaagggaccctgactagacaaataattgttgtagtcgataaggaaaatggagaaaggctagtaatcagcaggaattcctagaacttacatcgaagatcatgatgaagagattaggtggaataggttgactttaatgttatgcagaagagaagagcaagatcagttagtgtgtccagctgcgggtaagagaatactcaactaaaagttgtctagatgggaacattttttttttttctggagacagtctcaccccgacacccaggctggattgcactggtacgatcttggcttactacgacctctgcctcccgggctcaagcgattctcatgccttagcctccctagtagccaggattacagacatgtgccaccatgcccagctaattttttgtatttttagtagagacggtgttttgctatgctggccaggctggtcttgaactctgagcctcaagtgatccacctgcctctgcctcccaaagtgctgggattacaggcgtgagccaccgtgcccagctggaacatttatttgtctcatatactgtgaaagcaaatggagaccagttcttgagttggctgattccatgggtcagtgacatacttacaaaaccaggtgcttccatctttctactcagttatccttagccctgtcaacagtctcatggccacaagatggctgcagcagtcccaagcattcctcataaacacagcatccagccgggtgcggtggctcacgcctgtaatcccagcactttgggaggccgaggcgggcggatcacaaggtcaggagatcgagaccatcctggctaacacggtgaaaccccgtctctactaaaaatacaaaaaattagtcgggcgtggtggcgggcacctgtagtcccagctacttgggaggctgaggcaggagaacggcgtgaacctgggaggcggagcttgcagtgagccgagatcacgccaccgcactccagcctgggcgacagagcgagactctgtctcaaaaaaaataaataaataaaaaataaaaaaaataaacacagcatccagcacagaagaggaacatatctgcctatgcttttctctctgttagggagcaaggcttttcacggaatcctccccaccaccctgtcctcaggaccagcaggccaggattggatcacatgttcacatccctctctaatcactggctaggacattgagaatgatcatgatttacccctctgagcctggggaatgggcaccttccaagccagtgaaaggttaatgtccaaacaaaattgtggctctaatggcaaagaagaaagggaggaatggatttgagttagtaaccagcagcatctgccaccgtaaccagtttggtcccttcccacattgaaggtgaaaactgacaaaagttaattgtatgttaaggctgttaagcagctgagatggggatctcttcatggtaatggcacagtagaaagaaacagccttatcccttgaccatgtttatttagagcttacactagggcattccataatgccttgatggttattagacagttattagtaggcagagtttacatgaagagggttaaatgggggaccttatgaactcagtgaaggaacaaaagcagggaaaaacctgtggttaaccataagtgggaagcagggattaaagatttggatttcacagtttattaaactcagtcaacattttttgagcacctgctgtgtgccaagcactgtgggtaggcttaaaggttacagaggtaagatgtaatccctcatatactacacaggtagttaggttgtttcctgtaatgtgctacgtgtgcaaaggaggtattgccaggttctgtggagttatgagaaaaaacattcagcccagcctggtaacccagtagagctcattattgaagagtgagtcagagttcaggagaagaaagttgggcagaaacttcaaagcaaaggagaaacatgagcaaagtcacagagactagaaacagcagtcttaggttataaggtataagatgggaagtggtgggaaatgagacttgatcttgaaaggtagtggatgtcaagtgtgtccattggagttcttacttgcagactatagagtgtacttttcatccactcttttaagcagaaaggggtttattataagatactgggtaccttaacaaaacctggggaagagccagtgagccaagctcagatgctgctcagcaaagagcagagcagctatagatctatgcagcatgtgactgtcatagtgaaacctctgcacagtgctgcagaagaactggatgcttctactaccgtgcttgcccaaagaccagatttctagcacagtcgttatctcatgttgctcatttctaccccaagtcttgtgtgggagcatctgctaggaagaagctaggtctcgtggattgctgagctgctagggagtctgggaaatgtagctgtaagatagtcaagctagaagggagcaggagtgggtactaagtgaaccacctaatagtgtctgccagttttcagtacagctgagcggttttgatgaatttatctaggccgtggggtaccattgaaaagtgttcaaggcagggagtagtgtgaccacatttacatattgatcactggggctatcatgtacaacatggatttaggaggggccaattgggggctattgcaatagcaggtagatcacaaatgatgagggttgacaaggaagcggcgacaaagtgaaaactacgtggaggtagaatttagcaggaattggtggttgatttatatatgagagagtagagggtgatatatccatgtagatgtatccagcatacagttggtcatatctagagctgtggacttggaagtaataaaggagtgggccaagaacagagcccttgggcccacagcccctgccaggcacattgaacaggtgctcatgggtgagatggaaggagaccaagagaagagagcatctgagaaggcaaagataaagcatggctcaggaagtgtttggcagtgaagagggttatgtgcagattagagatcagtgggaaagaggaacagattttctttggacttagtgtgtagggcagcatcctttgctgaagcaaattcagaggccgtttgttgcatcctttttgtgggctgctagttaacacttatcaaaccctttttttcccctaacattgaggtataatatatataacataaaattcacccattttaagtgagaattcagtgattttttggtaagtttaccaagttatgcagccatcaccataaatgtcttagaacattttctaacaactttattgagatgtaattcaaataccatgtatttcacccagagtttacaattcagtgtttttttaagtatattcacatataactgcagcccatcaccaattttagaacattgtcatcccctcaaaagaagaaccttacactctagctgttgcccccttagttttagaacacattgctcaccccaaaaagaacctcagtgtctaaatacaattaatctccattctcaccccccggccatcacttaactttttgcgtagagaactgagaccacacacatggatcttgaagggaactaggcaccatggagtagtggtgaaaggcctaggaaagtggggtctgtagtttgggaaacacataggtcagctaacctaacactgttcacaggaggagatgaaacagaggcagtggcacagttggcaggtgggcttccagcctagagccttaggagaaaccagtttccttactcatttttagatgtctaagaatatataggatttttttttttttttgagacggaatttcactcttgttgcccaggctggagtgcaatggcgcgatctcactacaacctctgcatccggggttcaagcaattctcctgcctcagcctcccaagtagctgagattacaggcatgcaccaccacacctgctaattttgtatttttagtagagatggggtttctccatgttggtcatgctggcctcaaactccctacctcaggtgatctgcccacctcggcctcccaaagtgttgggattagaggcatgagccaccgcgcccagcctagaatatataggatctttagacgtgtttctttttagaggtaggaatgtagctaccacctagagcccactgagattcagctttcagaatctagagacatctcaggagccagggagccacatttcatctttcccttgaacagaacacaagatcagtggctttgcttcattctcattactctgtattagttaagcagtgccgccacatcactgtacaagcatgttttcaggaaggcatatgacgcactcctggtaagatggggcaggaagcactttggggctgggccttccaaccaggtgttcaggctgttcagggcccgcatgctgcaatgagaatttagcagtgactcctcatggagcaggaatatgatgcgcttaacgtattcttaaggacttctcagttttaattataagtttagtaatataagcagaatttaacatccagaattaaggctatttccatttccattctctaataaataaaaacatttgttgaaacttaaattgctcttctcaatgaaaactttaacaagtcttttgttgctgactaaacatatccatctctgaggcctaaagctttctccttctgtgttgggcagcaaccctgccctgcccttgtttgaactgaaattgaaagtggctcctcagaccaggcacggtggctcacacctgtaatcccagtactttgggaggccaaggtgggcggatcatctgagttcaggaattcgagagcagcgtggccaacatggtgaaaccccatctctaatttttgtaaaaatacaaaaattagccggccgtgatggctcatgcttgtgatcccagctccttgggaagctgaggcaggagaatcacttgaacccgggagcagaaggttgccgtgagccaagatcgcaccactgcactccagcctgggtgacagagcaagactccgtctcaaaaaaaaaaagaaagtggctcctcagatttaggccacttcttatatttggccactgccttgcagccttgtagttcacattgccaccctggtgttggtgtgacatggtgtcccatccctgaagctgcctcccttgttactcaccttattgctgtctgagaaaggaaatgggtgattcacaatccttaaatcaagtggctttctcttacctagaacttctgaattgaacatacatttaaacaatgacgttgaaaagatgtataactggagcaataaagactgaaaaagaaagctgcggccagttgttagtttttccgaggctccttatctgttgagtggcaccccaggctcccttgctcttgtcccccactgcctgtgatagagaagcctcttgttaaacactgggagctacttcaccacactcacaggctattcccagaaagattttgcacctgggtaaagcatccttgagaaaataacctgttttctttcccagagtgaacccagcttcatccctggaaccaccacatatgcttttcccctggtgggttcttaacctgttaacactgaaatctacattgttagctgctgataaagcatcagaaacatggtctaatctgggagtcagtatttggatttcttttttctttctttctttttcttttttttttttttttggagatggagtcttgctctgtcaccaaggctggagtgcagtggcgcaatcttggcttggctcagtgcaacctccacctcccaggttcaagcaattctcttgccttagccaccctagtagctggaattacaggagtgcaccaccacgcccggctaatttttgtattttagtagagatggggtttcaccatgttggccccatgctctcacactcttgaccttagatgatccgcccaccttggcctctcaaagttctgggattacaggtgtgagctaccacgcctggcctggatttcttattctagtatttattaataattcaatttgagaagactacctagactatttgagttttgtaatctctaattcctagctctaaagctaatcccttgtgaatatctagactggaaatccccgttaagtacctgcacattttcaggttttgttaactggttggagtcagactggagaatttcatttctattcatttttggttttctctttctttttctttccttccccacaccccagggctaccaagaaaagaacaaattcattgctgcacaaggtaaagtaatgacaacttttttctgttagatttaaccatgatcacataatgggtttggtttttttctcccaaatgctgagtggattaaccagaatgctgtagcttttctgtactttttaccacctgaaagaattataatccattatacaggtttacagctaacagccttcatcttgatgacttagtatccagggatccattaaaagaagtctttttgtgtatgtatattaaaaagactggaaaaggctgtatacacaaaacacagtctaataaggccctctgtccttggggctagttaaccttaggttccagccaggctgctcagagtttgaattaggaatcagtttccagagaggatcagccacctcacagggtccaggctggttctcccccagctcatgggcctgagcctcaccattattcacagatagttggtctaggaaccctcagatcagggacccagcaccatgtcctttatgtgttctacacacatttccaggcctgctgttctaacaactgtcttcactctttgaaccctagcaaaaatatctggatgtttgcagcattaaaaagtaattgaggccgggcagggtggctcatgcctgtaatcctaacactttgggaggccaagacaggaggatcgtttgagcccaggagttcaagatcagcctgggcaacatagtgaaaccccgtctctactaaaaattagccaggcgtggtggcacacacctgtgatcccagctacttgggaggctgaggcacaagaatcacatgaacccgggagccagaggttgcagtgagctgagattgcactactgtactccagcctgggtgacagagtgagactttgtctcaagaaaaagagtcattagggactacaagatttataaaaacaaagttctcctcccttttcttttcacttttttagtctaatgcccctggggcaaccatttttatctattggcttcttatgatagatgacatcatctgatccccttacagagcacctccccctcagtcagacagacgtgtacccacatatcctccccattctcccagaagagtcaaatcacaatttggggttaaggtatttattattattatgagtttacaaatattcacagccgaaacacacagtattatgttattttttgtatagtttttttcccccttcttttttagtcattgtgttttttatatacctactactgattttcctcccaaactctttaccagaagtatatatcttctctcagtacctttagatacatgaggtttaatttttttatcttgggatccttctagaatcttctttcttcagttgcattgtggattggttgctctctatcctctggcagagttatcattctaagaccagtaccctgggaattccgttagcctctctgctgtgttggatctcatttattttcctctgtttgcctctcatttttgtttagaattttctagtgactttccgaaaaaggttatatgggaggtaaattttgaattctagcctgaacaagtcatccaacctttctggggctgatgacacccacctcagagcataataggaaggagtaaatgccatatgaagcacttagctcactgtcaggtccataatgtaggtattctgtgagcagtcatgatttctaattcccaactgtaatatccttgggagacatcattcgtgttctgtttatatttttgacagccttccacccagccccatccttgtgcagtgcctggcacatacatggtagaaacatggaaaatactcaattagtaacggggtggatggatacatgggttagatatttagctggggacatttgggcacaagcttccaaaagtcaggaatggatgttcccagcctcccagcatctttcttcttggtgtatattctcttcatttttgctgttggctactttaggaccaaaagaagaaacggtgaatgatttctggcggatgatctgggaacaaaacacagccaccatcgtcatggttaccaacctgaaggagagaaaggaggtaagtggaaaaattggatgtgaacagcagaaggatcactctgcatataagctctgagtttaagcctggctgtctatcctttgtgggtgctgtaccagtagttcatccagaaagacacaggctgaagtctatcagactttgctatggcctggaagccccagatatgaacctcaggtgtgtgcctagagcacattccctgtatttggtagtcaaacaactcaccctggttccagaacagcctgaaagagactgacttgggccatcagctaaggaaaagccacagaggggttttttttgttgttgttttgttttgttttgttttgtttttttattgatcattcttgggtgtttctcatagagggggatttggcagggtcacaggacaatagtggagggaaggtcagcagataaacaagtgaacaaaggtctctggttttcctaggcagaggaccctgcggccttctgcagtgtttgtgtccctgggtacttgagattagggagtggtgatgactcttaacgagcctgctgccttcaagcatctgtttaacaaagcacatcttgcaccgcccttaatccattcaaccctgagtggatacagcacatgtttcagagagcacagggttgggggtaaggtcacagatctacaggatcccaaggcagaagattttttcttagtatagaacaaaatgaaaagtctcccatgtctacttctttccacacagacacggcaaccatccgatttctcaatcttttccccacctttcccccctttctattccacaaaaccgccattgtcatcatggcccgttctcaatgagctgctgggcacacctcccagacggggtggtggccgggcagaggggctcctcacttcccagtaggggcggccgggcagaggcgcccctcacctcccggacagggcggctggccgggcggggggctgatccccccacctccctcccggacggggtggctggccgggcagaggggctcctcacttcccagtaggggcggccgggcagaggcgcccctcacctcccggacggggcggctggccgggcagggggctgatcccccaacctccctcccggacagggcagctggccgggcgggggggctgacccccccacctcccggacggggcggctggccgggcagaggggctcctcacttcccagtaggggcggccgggcagaggcgcccctcacctcctggacggggcggctggccgggcggggggctgatcccccaacctccctcccggacggggcggccggccgggcgtggggctgacccccccacctccctcccggacggggcggctggccgggcggggggctgacccccccacctccctcccggacgaggtggctgccgggcagagacgctcctcacttcccagacggggtggctgctgggcggaggggctcctcacttctcagaccgggcggctgctgggcggaggggctcctcacttctcagacggggcggttgccaggcagagggtctcctcacttctcagacggggcggccaggcagagatgctcctcacatcccggacggggcggcagggcagaggtgctccccacatctcagacgatgggcggccgggcagagacgctcctcacttcctagatgggatggcggccgggcagagactctcctcactttccagactgggcagccaggcagaggggctcctcacatcccagacgatgggcggccgggcagagacgctcctcacttcccagacggggtggcggctgggcagaggctgcaatctcggcgctttgggaggccaaagcaggctgctgggaggtggaggttgtagcgagccaagatcacgccactgcactccagcctgggcaccattgagcactgagtgaacgagactccgtctgcaatcccggcacctcgggaggccgaggctggcagatcacttgcggttaggagctggagaccagcccggccaacacagcgaaaccccgtctccaccaaaaaaatacgaaaaccagtcaggcgtggcggcgcgcgcctgcaatcgcaggcactcggcaggctgaggcaggagaatcaggcagggaggttgcagtgagccgagatggcagcagtaccgtccagcttcggctcggcatcggagggagaccgtggaaagagagggagagggagaccgtggggagagggagagggagagctgttttgttttgttttttgagacggagtctcgctctgtcgcccaggctgaagggcagtggtgccatctcggctcactgcaagctccgcctcccgggttcacaccattcttctgcctcagcctcccgagtaccacccgccaccacgcccagctaattttttgtgttttttttagtagagacggggtttcactgtgttaggcaggatggtctcgatctcctgacctcgtgatccacccacctcggcctcccaaagtgctgggattataggcgtgagccaccacgcccggcccacagaggagcttttttcccctggtttctctagttccttatttccctggttttctgccccacctgctgaggcctttggtatatcctggatcagcagagggagctttatgaactgagaccctgcaagccaaagggaatttgaggccttggcctaatcctggaggcagcctcctaactgggccttttccttttgtggctaccaagtgcatgcctggcctaaccagctctatcactgggccacagccagagccaattctgggtcctggggtcgagccccagcgaggaatacctatttgttaccgtgtttctcaaggatggcccttgagtcaccttgatcctagggtatcgggtgtcatgatcaacagctccacagtggcatgggaagacagtgctagggctgggctttaggttagtttcctccaaccaaacctcttgctcttggaagctatccaaagctcaggcaacagaaaaagctctaggcctctcatggcaggtttacagtctgcatcagtctaccctggtggccccctcatagcagactgctggttcgaggggttcaaacaggctttctcctagagcatgacctgaaatgttgtgaaagtgcagattttgtaggtaagatggcttcagattcgccctgaaccaagggagtgtgggtgggaaacattgagaagtatggggctagggctgtgtgtaagttaggagactgtgctcaataggatggcggctaaggaacttgagaaaagggcaaatttgaataagtaagtgtgcaactgactgagatagagaagaggtcaaagggccttctgggggactttaatctgggctttgtgggctcttccttccaggccctttgcatctgccatgggcaggaggtctaaggtcagggaatgtatgtctttttctttccagtgcaagtgcgcccagtactggccagaccaaggctgctggacctatgggaatattcgggtgtctgtagaggatgtgactgtcctggtggactacacagtacggaagttctgcatccagcaggtagtgtctcctctgtcctttctcagttcttatgttggatctgctgaccagtaagagggaacaggctggatcatcccgctgtggtcaggagttgctgagtatgcagtatgtgaattctgaaaccagatatccgggctcaggggaacttgtctgtcaaagctaaaggagcagtattttcatgactggtgaaaaattacctgttgagatgaagtctgatcatttagatatgaccaagcactgtggaaagggagcatggggaggcagtgcagtctcctaggtgcttgactcacctttctcctcctttcctactccaaagactcctgacatcaaggatgtgatgggcctgcccctggccctccaggcaaccctggagacctgagcaaaggtcaccttcagccaaggggcagtgtggtactgcgaaaagaggacttagctgggagcactgcattttagttctgaccctgccactgactagttgtgagaccttgtgtctgtggttaactaactcccctgggtacacttacttttccattgtcactgacaaccacagctgtcaccttccctcccctggtactgcccacccttgggtatcagggccaacacacaggatctcctcacttcacaggtgggcgacatgaccaacagaaagccacagcgcctcatcactcagttccactttaccagctggccagactttggggtgccttttaccccgatcggcatgctcaagttcctcaagaaggtgaaggcctgtaaccctcagtatgcaggggccatcgtggtccactgcaggtcagtgtggcctgacccttgtacccccacccccacatttcgcccccatggccagagcaggggaacagcacaagggccctggctgaggaggctggcacagagtagatgacctactggggcaccagcgcaacagccagagactccaagttctagtgcagggtggagaatatgacttgaggaaggagggtagggcagtcctccaagattaggagttgggagaccctgctatgaagccaaaagactgggtcaagtgctggccatgtatttttgcagccttcggacccttctagctggaggtcaggattcaggacatactggagttgttggctcctggagagccccagctctaccccattcagaattaggatttagaccctgaaggaagagcccctgcctgtgttgcccctccctatctgctcccacaaggcaggctggccatccctataaccccctgctctctggctacagtgcaggtgtagggcgtacaggtacctttgtcgtcattgatgccatgctggacatgatgcatacagaacggaaggtggacgtgtatggctttgtgagccggatccgggcacagcgctgccagatggtgcaaaccgatgtgagtgatctgtgggtcaggtgagggtggggggttccaggactaaaacatctgcccacattgaggattcactcagtctcacaggttattgtaaatgattactatagagtgtgattgtgggggaaagaaagatagatcacactgttaccgtgtctatgtagaaaaaggaagacacgagaaactccattttgttctgtactaagaaaaattcttctgccttgagatgctgttaatctgtaaccctagccccaaccctgtgctcgcagaaacatgtgctgtattgactcaaggtttaatggatttagggctgtgcaggatgtgctttgttaaaaatgtgtttgcaggcagtatgcttggtaaaagtcatcgccgttctccagtctcaagcacccagggacacaatgcactgcggaaggccgcagggacctctgcccaagaaagcctgggtgttgtccaaagtttctccccactgagatagcctgagatatgccctcgtgggaagggaagggtctgtgctgaggaggattagtgaaagaggaaggcttctttggagttaagataagaggaaggcatctgtctcctgctcgtccctgggaatggaatgtcttggtgtaaaacccgatcgtacattctatttactgagataggagaaaaccgccttatggctggaggtgagatatgctggcggcaatactgctctttactgcactgagatgtttgtgtaaagtcagacataaatctggcctacgtgcacatcaaggcacagcacctttccttaaacttatttatgacacagagtcctttgctcacatgtttttctgctgaccctctgcccaccattaccctatagtcctgccacatccccttagccgagatagtagagatagtgatcaataaatactgagggaactcagagacgagtgctggcgcatgtcctccgtatgctgagcaccggtcccctggcccactgttctttctctatactttgtctctgtgtcttctttctttcctcagtctctcgtcccacctgacgagaaacatccacaggtgtggaggggctagcccctttcatgtgatgaagggctcttataaattatgtattcaaagaaatcgagcacagaggaggttgtggtttcatgcctgggagagtcaggaaggcagatgacaggttactggacttcaaagattagggaacaggcagctgaaagagccagtgcccagagacatgatgaagctcggccacatctgggagcagcagtgagattggctctgcagttggggcatagcaccaggagggaggcagggaccagactatcacgggctttgggtgtctccagtttctgacagccccttcagactattaaatctgcactctcagaatgaacaggaattgagtttgtccttctctccaggcgtccaccacccccaagatagacctggacccttcttcccaagtaaagcacccccacagggactcctgcatttcaagtcccacttcactaaattgggataataagagggagtccttttattcctgctaggatcaaaggagaaatggactggagtgaagtgggggtgggaacaggtgatctggcatgagaactatgttgtatgtaaccaagaacttctgtgtcattcatgtttcagatgcagtatgtcttcatataccaagcccttctggagcattatctctatggagatacagaactggaagtgacctctctagaaacccacctgcagaaaatttacaacaaaatcccagggaccagcaacaatggattagaggaggagtttaaggtgagttggagctggataacctccttcagattgaaggatccttgtaatctggggaacatgggatgcctgactgtgcatttgccaacagtaaatccccttgtgaggcatgccagtggttaaggagatggtcctttcctcgtactctggtaactctcaactcatcctgcacgttggaatcactttggttgtgttagagtagggagaagcaggcaacagtattttaaggcccctagccctccgaggtgattatgatacacagcaagagcagttttttctgtaagagccagataataaatattttaggctttgcagcccacatggtttctatccagctacttagtgctgtctttgtaacacaaaggcagccataaccaataggtaaatataatgagtgtggctgttttataaaactttatttgcaggcagcaggcagcaggccagatttggcctctggaccttagatcactgatagctcctatatgccactagacaatggttctcaacacacctaaggcatatgtcacactgtcatcagtaaaagtgctctcccaggctgggcacagtggctcacgcctgtaatcacagcactttgggaggctgagacaggtggatcatgaggtcaggagttccagaccagcctggccaatatggtgaaaccccgtctctactaaaaatacaaaaagtagccaggcatgatggcacatgcctgtagtcccagctactcaggaggctgaggcgagagaattgcttgaacccggaaggcagaggttgcagtgagccgaaatcatgccactgcactccagcctgggcgacagagcgagactccatctcaaaaaaaaaaaaaaaaaaagtgctttctcagaagcaggagattctgggttggggtggggaggaccacttagagaagttcttctcaaatatagcatgtgcacagatttctttgggatcctgtcaagatgtgggttctgccaggcacggtggctaatgcctgtaatcccagcactttgggaggccaagtcaggcagatcacctgagctcaggagttcaagaccagcctgaccaacacggagaaactctgtctctattaaaaatacaaaattagccaggcatggtggcacatgcctgtaatcccagctacttgggaggctgaggcaggagaatcacttgaacccaggaggcagagattgcagtgagctgagattgtgccactgcactccagcctgggtgacagagcaagactctgtctcaaaaaaaaaaaaaaaaaagatattaggttctgattcagcaggtatgagttagagcttgagattctgcatttctttttttcttttctttttttttgagatggagtttcactcttgtcacccgggctggggtgcaatggcgcgatctcagctcactgcaacctctgcctcccgggttcaagggattcttctgtctcagcctcctaagtagctgggtctacaggcacgtgccactacccccggctaatttttagtagagacagggtttcaccatgttggccatgcgggtctcaaactcctaacctcagttgattgcccaccttggcctcccaaagtgctgggattacaggcatgagccaccacgcccggcttgagattctgcatttctaataaggtgaagccaacgctgctggtgtatgggctacactttgagtagcaaatgtcaagaaggagcctcaatcgggaagggaggatgcaattctgaataagtttttttgaagagccttaggcagcctctgggggtggaactgcagagtggacacactccctcctacgatgctggaatcccttgctccaggatcacaaaattccaagccaggagaatctcaagagagtccacaggagcctggaaggtagcatttcccaaacagtctcttggcttcagggttccagctgaacatatgggaacagaggtcagggccctggtgagaagagcagtatggagccagagtggcctggaggtgcaggccaagggacaggcataatcttgtcaagttcagttactgggatcagtaatgtttcccctccccttcccaattcagaagttaacatcaatcaaaatccagaatgacaagatgcggactggaaaccttccagccaacatgaagaagaaccgtgttttacagatcattccatgtaagagccctcccgccactccaaagccttattgccccatccctcaattccctccaccccttccatttctcaggtactagttaatgattggcgtatagacaagaatcatggcattgcctcttgttgcacccacttaacaacatggcgttgccttttgttgcaccttagtggcttctggaaataacgtaaaagccaaaggctttctccctaatgagctaggaacagacatgtccttgcccagctgggattctgtctgcccagggcctgaggtgggagcaatgcaaggagagggagaggacaaatgatattggctagccataagccgctattcttcttacagatgaattcaacagagtgatcattccagttaagcggggcgaagagaatacagactatgtgaacgcatcctttattgatgtaagtggtgggtgtgacccctgagcccccaacaccccgtggagattcagccagcacttgcagtgcctccctcccatacctgctggggaggatcatgtttgaatcagtcaacaaatagtgaattgatactcacccacccactcaccctgtgcattaggtctgtccagctccatagagcagaaggtgggggaaaacagatggcatgcagtagtataatacctggaagaaaaagttcacagagcagaccacagccaagaggaacctggctgccccctgatctttcccattcctgccctcttcatcctagctctaatccctgttccacttccctgtctcttacagaaagcaaccagcttgtcagatagggtttcgtccttggccacaggggagctctgcatgggctgagtttgcctccgagcagtccccattcccttctagtggtctgtcttctccactagtccctctgtgattaaaccatctcacccttgcaattaacctggcctgtgcagggctaccggcagaaggactcctatatcgccagccagggccctcttctccacacaattgaggacttctggcgaatgatctgggagtggaaatcctgctctatcgtgatgctaacagaactggaggagagaggccaggtgagttcaaaaggtcctgggtggtgagagacagagacagcatgaaaagatgtgtgtgtaaatggggacgttgggaaggcaagaaggtgtttggaccttgtctttgacttatacggtccaaagagtacgtttgcatagtataagtacatacttaaaggtatataaatacatatgcatttccaggattgcccagcccgttggtgtctaagcagtcattagcttctcccaagactagaaaagcaatgtgatctgagcctccatgttattcccagacagctcacacccttgcactttctcctgaatacagtccccctagcctagcctttgcacagtgccccaggcggggggggcaccctctccttcccagtgccccaggcagggcagataggtcaaggttctgaggtggacccaatatgagtgtccctaagaagggattgcctcattgctgactacataaaataaagcagtagaatttgagaaattatacaaacaagaaacttacagtctaatattcagtaataaggaaatcttttaaagaaaaaagccctcaggtctattaaaaagcagagctgtccggaaactcatactaaaaagggacactagcagtcccctaggtcaacttcctctcagtataggaaacctcctaatattgttcctgagtcagaatcatacagcctctactaagcacattcaatctcagggatatctccctcaccccccacattatggggggacccagtctgtgttctgacaatgcttattcttttaaaaattatttctgttgaggttgcacattgcagcaaatgagcggttcactatgtctggggtgtcacttagcagggatgagaatctagagaatgggcctggagagaagctagcaaggcctggtgagaaaattccttctaagccacagtgaagagtttggtcttcctaaagcaattgaagagcccttgacaacatcccatttgtgttttttaaaaaatccctctggcagcagtgagaaggactcattagaaatgcgaaagctgtggcagtaatgctggtggcctggactcgggtggtgagagggtgctgtcccagaaagggtgaagtgaggaggaattaaggatggcacccactcatgactcattgaatttatagtcaaacatttaaaatacaaagtatgttttacattagttgtctcaagtcactagttgttccccatctgtacttgtgttaactttggtacaaggctttacacatattttctcaccctgatgtttcattacatcaggattttttttttttttttggttttgtttgtttgtttgtttgtttgagagagggtctcactttgtcacccaggctggagtgcagtggcacgatcttggctcactgcagcctcaacctcccaggttcaagtgatcctcccacatagccctccaagtagctaggactaaaggcacgtgccaccatgcccagctagtttttgtatttttttgtagagacagggtttcaccatgttgcccaggctggtcttgaactcctgggctcaattgatccacccacctggttgacccaaagtgctaggattacaggtttgaaccaccttgcccggcatttttttcaattttgatcagtcatttaactcattagctattcttcctagacttgtatcatgtacctaatcaacagacatactttgtaggtcttcatcatcttttttttttttttttttgagacggagtctctgtcacccaggctggagtgcagtggcacaatatgggctcattgcaacctctgcctcccaggttctggcaattctcctgccacagcctccctagtaactgggattaaagacacccaccatcatgcctggctaatttttgtaggcacggggtttcaccatgttggccaggcttgtctcaaactcctgacctcaggttatctgcctgactcagcctcccaaagtgctgggattacaggcgtgagccactgcgcccagtgtcttcatcatcattaataacaatactgatgaggtgggaggttcggttaaggtgcttggctttgcactcaaggaagcacacacctgagtaacaaaagctgtttaggaaatgagccactgtgttctcaggagctaggtgcctgttcctgccgtctctgatcagtcgtgatggaacctgcagatcagaccagggccctacctgtggttccttctgcacccctgcccttcagatctgtgatgggcaggaccaaagagcaggccgaagagctggaaccacgagcacaaggaccatctcggcccactgccctgtgataaaatgtggcccagtgaacatctccgcctctgtccagtcagatgcaggctcttccatccttgaaaaggacctagtgagagtaaagggcagggggcaggaagcatttcatgtgtgtggcggtggggagaagagtcgtgcgcacacaaattctgctgcctgttgagtgaggcctctccctctgccttccactgtagcttatgctctgtcttcctaggccagtgaagcagacagtagtgcttgccctcaaaagcttctgagtggattggaacaggatgttagtgatgttctttacaaggcctcactggcccccaagttcactttctgttccattcatgttgtcaagtgtagctcccagaagtaattaacgcactaagcctaaatgatgcaatgaaaggtgcctacacttatacagtgacactaccatcctcacctacaatattaagttcccagagaaaaaaattcgatcccataatataaattctgtacttacaaattaaaatctcgaaggaattaaaaatttttaattatctccctctgctttttttttttttttttttttttttttgagatggagtctcactctgtccaccagactggagtgcagtggcacaatctcagctcgctgcaacctccacctccagggttcaagtgattctcccacctcagcctcccgagtagctgggattacaggcatgcactaccatgcccagctaatttccatagtagagacagggtttcgtcatgttggccatgctggtctcaaactcctgaccccaagtgatccgcccgccttagcctcccagagtgctaagattacaggcatgagccattgcgcctggcctccttctgctctattttaatcaaaagggtccaccaggatgcctgggttccctcagcagctgcagcttggaccatcatcagcctgggcagacagagcagtgccaggaactcccatgctgggtcaaccctaggcctagcccaaccctaggcctcatcctgcttctctaaagcatagtgaaacctgatagcattagtcttcacaaagctgtgtgtccccatcaccatgtccgccttagacctcataagagacataagacataagagacttcatgctatctggtggaaagacaaagtaggagaaaagacagaaaaccttccctgtttcacttctttaagatgctattatctagaggccgtaacgtgaacacacaaatctgagatgaaactccagtccccagcttttcttctactggtcttgaatccccattccccatcttctgtccctcacccactgatgactttaacacctggcttactgctccttttgagcccctgttcctgactctgcttttggaggcatcagtcaccatgtggatgatccatctatcctcaatctttctattcctcagcttcctcagccacctgatcccatggtcaagtcaccatctgccctgtatctgcactgcccttggaatctcaacaaggcatccgccctgtttactgcctccttcctcccacctcagtattctcttttattccagtcatttttgtcttcatcaagtccttagagttattgatgcctccactttctcaacatcagtcacaccgaacatgtcctcaccttcctccttactctgtgtgtttttgagttctgtttttgagcgtttgagttttctgatttgagtttttgtggtatgtcattattacctttccttattccctcatgctttcttactttcatagcaaactctctagtaaaacccagttatatgcctctatctgatatagcaaacatcactgggcaaaaacacaaaacagtgccaaatgctctcacactgaactcatgaccacaaatctcatagaggtaattggtgccacctagcaatgctattgctctttcttttcttcctgaaacctccagcatctgctcttgcctgtcccatcatactcacaccttagcttgtgacctggcctcattcttctccaagaaatcagacaagaacactgtcatcctcccacccccaaacaaccagcctcttcaaatctgtaccaactctattctctcttgttacagtggaaaagggtttctgcatctctcaatccacctgtccactgtgctcttggccccattccgtcctgcctgctcagggatgttgctgctataaccatcttctctcccacctccatcagcagttcccctctttaaccactactctcatcagcctatacatgttacatttcctatcttttaaaaacaaaaaatctgctaatctcactttcccttccacctactatcctatttctctgcaccccttcccagcaaaactcctttaaagagttggctttcggccgggcgcggtggctcacgcctgtaatcccagcactttgggaggccaaggtgggcggatcacaaagtcaggagatcgagaccagcctggccaacatggcaaaaccccatctctactaaaaatacaaaaattagctgggcgcgatggtgcatgcctgtgatcccagctactcgggaggctgaggcaggagaatcgtttgaaccagggagctgaaggttgcaatgagccaagatcgcgccactgcattccagcctggtggcagagtgagactccatctcaaaaaaaaaaaaaaaagagttggctttctccctgcaagttctctgttcgctctgttccttccaggcttggccccactgggactgctttagtcaagatcaccagtgactgtcctcttgccaaatccaaaggtcatttctcttttctgatttttttttttttgtccttacagcagcatttgaaagagtcagtacctccctcctcttcctcagaacacttacttccgtagcatcaccccactcactaacctggcagctcctttgttatttctttgtgacctcctcctctaaaacattggagtatactagactcgggcgctagcccactctgttttcttttgacacactagcccttcaggatctcagccagtcctatggctttaagtacaacccatatgccagggatcctcaatctgcgtctctaggccagtcacctgtcccccttcccaatgtgggctcctgatttcctccttcccccgacaccagtccaccccactcttagccatctaaataaatagtaccaccttctgcccagttgctcatgtctaaaatccgggagttaccttccttcctcccctctcctcacccctcacatccagtctgccactgagtcctgatacaggcagagcctccccacttttctccagcgtaactgctgtcatctgaacaagccctcgtctctcactgcttgcccgtgggactgtgggcatgactcatatgcgcagcctcgtctgcagtggcctggcaactggtcctcctgctctcatcctaacccacttttagtttttcaaatggcagctgctggtccttttgaaaatataaatcattgtcactccttgtcttacaaatcctgtttgaggccaggtgcggcagctcacgcctgtaatcccagcactttgggaggccgaggcgggtggatcacctgaggtcgggagttcgagaccagcctgaccaacatggagaaaccccgtctctactaaaaatacaaaattagcgggcatggtgatgcatgcctgtaatctcagctactggggaggctgaggcaggagaatcacttgaacccgggagccggaggttgcagtgagccaagatcgcgccattgcactccagcgtgggcaataagagtgaagctccatctcaaaaaaaaaaaaaaaaaaaatcctctttggtcttccagagatcttgagagaaaatccgcccatgtatacaaaatttagagacttttgatcagatgtggtggctcacgcctgtgtaatcctaccactttgggaggctgaggcaggtggatcacctgaggtcaagagtttgagaccagcctggccgacatggtgaaaccctgtctctactaaaaatacaaaaattagctaggcatggtggcgcacacttgtagtcccagctacttgggagtctggggtgggagaatcacttgaaactgggaggcggaggctgcagtaagtcaagatcatgccactgcactccagcctgggcgacagagcaagactctctcaaaaaagaaaaaaaaaatgagactcttagtgttgatacctagtccctagacttgatatgtatttctgtctgagagatcatgctcaattcctccagcacacacacactgtggctcacacccatggggaccttatggttctgatggttttaaaggcccagtcttcatcccagctgagacactgtgtaaagcagtgttgagaaggcactgtggtagcaaaatccattccacccaccagtgccataaaaactaatataatgcctgatcgaggtgagccttaatgagaatttttttttttttttggctgttctggttgaagagaggcccagggcaccgatccctgaggcatccccagggcttctagagaacatgggtggaaaagcactagtccagggcatgttcttgattcaacactttaataatcatgattttatttggactgtgagactattcacaatttctttttctacttaatttttttccaaatctttcaatgacattatatgtatggttgagaatttttcaattgccagtagtgaagaatctcagatcttacccccaaattctctaaagaaatgggcagcataactgtgtgatgttatatttatgtatttatgccttggcttgttctgcagacattgaacaaattcatttaccagatactgagagcctaccatgtgccaggcattgtgcaaggtgtggggaatacagagatgaaaagagacgcagccactcccacaaggagctgtagagggaagtgagccaggtgcaagcaaagacagacagtagaccacctcctgctcactagcaaggacagaaaggcgagtgctagcaacttgaaggtaccttgcagatcaaagagataaaggtaaaagggagaaaggatactgtggcctgggcggtggtgaagcccatggctgtgtgggaatgtgaattggttctgattttctgaattagcagtctggcggatgtaagcagcattaaatatgaaaacaccccatgggagaaaaagaaaggaattggaacaaagattttcactcgtcctcctctccctgcagccaccaagtattggataccctgtgagcctgtagtcagagtcctttacagaccccggcagtgttttagatggtctctggtgaggatcggaggttaattggaatgatgtgatataatgatcctgcaagttttcaataccttggggacgaagcgtatcagcgtaagaggtggctgtactgagaggggtcaggctgctcgtgggcagtgctgcttctacacatgtggtactctgagctcctcacctctccaacctgtctctccaggagaagtgtgcccagtactggccatctgatggactggtgtcctatggagatattacagtggaactgaagaaggaggaggaatgtgagagctacaccgtccgagacctcctggtcaccaacaccagggtaagatgggtcgtgggtggactctgcccacaggaaaagcagggttacccctgcctccctgatccccttttttccaaaggagaataagagccggcagatccggcagttccacttccatggctggcctgaagtgggcatccccagtgacggaaagggcatgatcagcatcatcgccgccgtgcagaagcagcagcagcagtcagggaaccaccccatcaccgtgcactgcaggtatggctcacccttgccctcagcgggagagagaaagcgaggaggggcagataggggaagctgatgaccatgggtcagactgaagaaagccatacaagagcaagatattggtgagcacatagtagttgagattgatgccaagacaggattggatgctaagagagaggaccttggagcttgaacttggcacaataagtgctaggggactaatgttcagatagtgggcaggagagcagcaggggagactggcagtggagaccccggttgtgctatgaacagagggtgaaagagaagaggagtcaagggtgtctcccaggtttgagcctgggttggtgtgaccagcagaagagagacagtaaagaggtttgtttgaggggaaaagttgaattttgtatggggcatgttgctggaggttacgttttagaaaaaatgcactcctttacttagaatcctaacaacagcttacaaggcccaatatgttctgaggggtccctggccagggccgggagaggatggtgtgcaccatgggctggctctgagcacactcctgccatgggcctgagatgccagtttcccaggcagccacagggctttgcccaagccttccctgagtaccctgccagaactcccactcctcttttctctttccttaccacacatcttcttgtctggggacattgctaaaccccacagtccctgcctcagagtaggcactcagtgtctggtgagtgaatcagctgatgacattgaatagggggatattgtcaaggtcagagtctggattccgtggatttgggaagaaagtgaaagacatggaaaggaatcagcagatacacaccagtgtagggagtggggtttgtcagaaaaagggaaagacaggactagagctagttctaactgagcgaacagcaggtcagaacaacctaggccagcatgtgcaggtggacagcaatggctctgtgctggtggggtgtgagtgaaggtcgtcccccacggtccaacaggtgagtccctccacagcacatggggccatgcaggaagggcacagggtacactgcctcccgacccagaacccctccaggctggtgggtccacagggcaaaggcgagcaccagctgcctgcccccacctcttctgccactcaccactgtcactcacccccttgcacagagggccatcacaggtgtggtaaatgtgtctgctctgttgcagcgccggggcaggaaggacggggaccttctgtgccctgagcaccgtcctggagcgtgtgaaagcagaggggattttggatgtcttccagactgtcaagagcctgcggctacagaggccacacatggtccagacactggtatgctgcccacatatttgtccctgccaccacaccacctgcagcccttctctcagggaggaggctcttcagaggggcccacccagtagtcagaagactgtctaaacacagacctgcccttgccctcccaaggtgccccaaatacacaggaaacattgggaggcaggatggcagcaatgggagcatagcccctgttgccagaggttgggccaggttagaaggggtgtctgggtgccccacagggctcatctgtacttctctgtgggtcttgggtaaggaagatccatgaagagtacctgcctttgggcttgggctccctgttaagaggtctgactttaataagccgcacatccacagaggttttcctgaatcccatggagctagaaatgtttggggggtaaagaaaagtgaatgttaggaggtttgggagacgaggttctgagagccagggtgcatgctagcctggcagccatggtaagcgtgggccatgctcagctgcactgtctcccagcccagcacatgcctgtctgacctctgtggggcctgggtcagctctggtcagctctgcttgtagaaggtctgctgcattcagcccggaaggggaatgctgtcagaactctggcaggcagatcagagctcaggtgaaagttcaaaaacattcagttcctcttgattttccatcttcaacaaaaaaatgagtctgttaggaattacaggtactgtgtgttcttcagtaaccctgactttttccctacctttcactctccaggaacagtatgagttctgctacaaggtggtgcaggagtatattgatgcattctcagattatgccaacttcaagtaagcggcaacaagggtccgtggaccaggaggattgcctttaatattttgtaatattctgttttgttaatataccccaaattgtgtatatatcttataactgttttagaaattggtacataggcttctattacctattaggtggaaattttatatgtaaatgtgttagcactgatagtcctttttccaatgttttattggggaattaaatagtgtgatgtttggattgatatcgtgaaatcctcagccgagaaattgggctggattgtgctttggttaatacatctttccctaaagaagataaacacaaaatccattccaggtagctcggcaccaactaagaaaaaaagcacaaagttctcagagctctcgaggaaagtggttgtccccgtaccaccatgcactgtaaatatccctcccctctctccctggtcccctcccccatccccaccactgatatcatggggagtaataggaccagagcggtatctctggcaccacactagggactatcaggtaataaaagctttgactccctgaggaaatgtctctccctttgtctgggggtggggcagccatacaggctggggctctcctcggctgttcatggccctcctgttgctgttctctctgagttatctgagagaggccacagtcccccagctcctcctgtccaccaaacacagcccttccagttcttaggtgatctccaggaccctcctttcattcccagcacatctttggtttagtggtcctggccagcctccctccctaggaaggtggccaggtcctcactgagtctccttaaggacaggggcacaggggagactagagctggctcagctttgggctgaggccagtctgacctctccagtctgtggtgctttgctacaaaactgtctggattgtgtcaccctatctaggataaatctttatgtccacatatattgtgttgaattgttcccattttctttcatacgtgtcctcatttctgggacagtgtgaatgtttctcagatctagaagtcagatggtgggagtcttagatccgaacttggttttgagtgacatgttagacaaaagtgttgaacttttgtttcttaaagaagctggatgttcatttatgtctcccgtaacagtctgtgctgtccagagacccagtatccttaggatattattctcatcctcatggttgaagctgggtcactgccatgtccataatccaccctgaggaaagagcatggagagccagcagcttcatttctaaggacaggaagccaaatctgcacttttcacttccactcataatccaccccgcattccactcatcagcttcacaagtaggttttcacctggtcatagctatgcctaactacagggagtgctggggaagtgtgatcttttgttgggggcacactgggagagtgggtctgtccactgcctcccagcctcagagcagctcaccacaggagcaggagagtgaactcgtggctgtggctgtcaggcagggcctttcttgagagccagcgcaggcctgggctcctcagaggcttctggagtgagagatggcacctcagcctggcccatggaggcatgttcagggatcagcactactgtgcttcttggaggaggtgggacttgagctggacccatgggaggctggaaatttagatgagtgaaaaggaggaaaggcgaagtagagccacattacagagggcctcagagtccagataaagcagttaacatgtagtggctccaggagggaagcctgtctgtgcaccacatacccaggatgtttgtgggaaggaaggagatgtgcggaagggacccaggagacctgcaggaggcaagggctgcaacagaccccctctggaagtttacaggaggtgagtgtgagtcattagagacattcagttctgtaggaactaacgaactcccaagaggcagtaaacttaaaactcagcagtctcgataagtatggataaattaggcaaagacagattctgaggaatttctggtgaggggtgccaagtttggggagcagcccctggctccttgcaagctacccttcagtgctctgtgtgaccaagtccaagtcgatgcaggagggcaggcactgggtcagcaagccactcagtgaatgtgcaggtgaggccgttcataggcgcttgtgtgcctcccagcaggctgcctgccattgccagggctggccttcagcagggtgcgccaccatggcctgagtggttttctgctgaagtccgtgctgatttggccagtggataggcatcacctgggtgcaaaaccattgtctccaggtaggaatgacctcagctgtttgctccgtgtctcgctcagcctgtagatgtgtccctcatcccttcatgcctccctcttcactcctcttttactttctactcggggcttgcatgtttacaagagaggtgaacccaacagaaactagtataggccaaaaggaaaatgtgctgaagctcacacagcacagtcgtgtggaaaaggcagcagtgactgcttcatccagtgcccttcccacagccagtcagttgcgacccaaggggcttagggtaggagtgtttctccataggggaagagtaacagcctgcacccaccacacacccaaagccctacatcctgccacactgagacctcacttcatttgggcgggtccctcctgggttgcagtttccttcattgctcccctgtcccaaatactcaagtctctctcattaaaaataaagagcaggccaggtgcagtggctcacacctgtaatcccacactttgggaggccaaggcgggtggatcacttgagcccaggattcgagaccaacctgggcaacatgacaagatcctgtctctacaaaaaataacaaaaatcatctgggcatggaggcacacgcctgtagtcccagctacttgggaggctgaggtggaaggatcacctgagcccatgaggtggaggctacagtgagctgtgatcatgccactgcactccagcctgggtcaaagagtgagaccctgtctcaaaaaaaaaaaaaaataggccgggcacagtggctaatgcctataatcccagcactttgggaggccaaggcggacggatcacctgaggtcaggagttcgagaccagcctggccaacatggtgaaaccatctctactaaaaatacaaaaattagccgggcgtggtggcacgtgcctgtaatcccagctaccggggaggctgaggcaagagaattgctggaacctgggaggcagaaactgcagtgagctgagatcacgccactgcactccagcctggatgacagcgagactccatctcaaaaaaaaaaaaagaaaaagaaaaagaattaattaattaattaaataaagagcatgtctcccaccccaggcctaagttcttccctctatgagagactacttgcagaaacctgtgttctcactcttcccccttcctcacttcattcccacacatttcttttccatccctgcgcaccaaggtcaccttggtgctaaacaccagggacccatggtctcttcccctttgtgtcacaggctgtcctctgcctcttatcctcaccctttagctgctcctccactgtctcctctctcagaggtcaggattctggatctgtctctgtggaccctcagctctcctccaatcccaagtcccccgcatcctggtcgcatgtcagggtggtccagagatgcctgcctcccactgcccacacccaggggcccgccctcctttcctctaaccttcccacatactctggccccatggatccacggcagttcctgctggcccttctccattttgttccttatgctgcacccctctgctgccactccctgcgtccgtgactccagctcactcgtctctgtccttcacccaggccgcctgctcagggtttgtgcctctctgtgctcctgcagcacctgagtgtttattcacctctgaacctctgctttcccacctgagtacacgcagctcctggctgcagtgacttcatatcctgaggactggagctccgtggtgaacagatggctttctatgttctaatgagagggatacaagagttccacagttctagtctggaaaggaccaaacatttcttaaaagctaagtatgttgccggaaaaaaaagggagcagagctttccccaggaagcttggctctggtttagatttttcaggaaaagccggaatcaaattacagaataaataaaggcaaccatcccccttttaaaggtacaccagccttggtgcatctttgaagaaagcattctgtaaaccccaaccagaactaaactagtacgtcgaactcagattcattttcactaaaccacaagcaaatgtttccctaaaaatcacccagttaacaaagtccgcatatttaagccaaaacaatttaactgaacaaatgggccacacgttgatttccggtccctgctaataagtcagtctggaagttcacaggtgtgcccatcctgccttggctgctgaagtccaggtgtctagggctgactgatgcccattatgcctcccctcccccatctttgtcacaggatttgacgcaccagctctccaaatgaccctggccctcccatttgctgttcagcccaagtgcggagattggctatgaaccctgtaaacaggcctctgacccccagaggctgatggctggccaaggaaagctgagctgctgacgcagactgggaagcaagagcccacttccagcagcccaggctagctgtgtccaaatccatgactggggaggggttagagccttgagggacaaaattattctacctacctagggagactgcactggcccaacagctgggccccatctcatgggcccgcttcttcgccaggagagaagccactccggggtaggtactgccccacccaaacccagccatctggagtgacccagccctggttcccaggtgtgtggatgtgaattgtcccacccaacccactctacagtgagcaaacggaagccctctgggagagtggtcacagcctcccctgtacctctgaacagcctgccaggctccctactcttaggcttccactgtccaccagggaaagccctgagctgggagttggggagcccccaggcattgcccctgcccaggacacaattctcttttgggatcagggaaggctgtgagggctttctaggtctcaagatcaggagcttgaagatgcagcctgggaagtgggaaggtgagaccaggacataggccagcctaaagcaagagtcctgggcctgaaggctcctgggaaggtggtggggagggagcatgtgtcggtggcctcagggcagcagctgcctggtgaatgttcatggactggatgctctgggaagcgggttgggtggtgagcttctctcttcccctctgaagacgtcactggagtctgggggtggagctgcctggtctataaatcctggggccatcaggctagggtcctgcagctgcctgaaggagccatctcatccacagctcttccttggtgagtggggagccttccctaagggctaggacacctggaccaagtttcatcctgggcgtatggtgtgctgctcctcttccccattcccaggtgcctccacccctgaaccatgccagagaagtccccttttcctctcctctccccaacagctctaccatctattcttgtgcttgttgcccctggcatgggagggataaggggtagaagcacttgcccccatcaataccactcatccattccacatccccaactactatggaagagatacagcaggccacggagaaaagggcagaaggcctgcaactctggttccctagcactggtgctccaaacacgcctacattgagaactcccctgaccatccatctatcctcccatccattggcctgaattcaggtctctgttcccctccaactttcttccacttctggaaactccttgaaggaaagatggatggacctggacaagtgggagggccctcagagctggcaaggcaggtagcctctgtgccccaggctcagggagaaggctcgtcccctggagcatcatcccctgctgggccaggatcccccaggatctggacccctgtatgcttgggatgaggagcggtggcagagagggaagggcataaggagataccaaagctgcccctgagatgccagttttccaaagtggccctggaggaagtagggggatgtgggggtgaggtaagtctccttgaatgctgtaccctgtccattagagcagccatggccagctccaggcgaggcctcctgctcctgctgctgctgactgcccaccttggaccctcagaggctcagcactggtcccatggctggtaccctggaggaaagcgagccctcagctcagcccaggatccccagaatgcccttaggcccccaggtgggtgtctcccagcctcatggggaggaagaaagtgatggccgggggctcccccaccctcctggagcctgaggtcggggtagggaggacagcatcagttcccttctaaggaagggccctggacactgcagcaggcagcccagtccagactgcccatggcctcccaagtgatgccctggctcccctggacgacagcatgccctgggagggcaggaccacggcccagtggtcccttcacaggaagcgacacctggcacggacactgctggtgagtagggtgagaggtccccagcatcaagaccagccactggtcatcagaggccattgtggcttagggttgggtgctgggagggtggggagaatgaaacaccactgagatgccccctgccacagcacccccagccatttctcagtgcccctactgcacacagcagggtgctgtctgctatccttcctatttcccaggaggattctagacaatttacaaagcacttgggttaaagaccaaagtcactagtagactagaaggagataattgttctataagacagtggtggccatgggatcccacaggcatcctgacaagccaatgactgtcttgaggtggacagaccccaggccagtggaaagaggtgagggatgcaacctcactcaaacagacaacagggccaagaggaccaggtggtgactgacatgtgcactaggaacatctcagggactgcagagctccccaagaccatagcagaagacaggcgtggggaaatggtttgctactgttttgcaaatcaaacatttacagtgcatcaggagagcccggtaactaaagaagaaagtggttagttcctatgaggcaatgtcttaccgcctgatttgtgtgtatgtgctgaggtttctatgcgtcaggcttgtttagggtggacaagagggcatgcccaagggagctggagatccccacactagctggatcctcaggcttctacgggaggcggggggcgtcctgctgtgggaggccacatggggactgggggggacgagaggggagagaaccaggaagatggcagctcggcggttacgagaccagtgtcctgagacatgaccgccacctctccctccgcagaccgcagcccgagagccccgccccgccccgccatcctccaataaagtgtgaggttctccgaagctgttgcgtcgagttctgtccttcgtcccctccctgtcttccccgctgagacccttccctgcgtgggggctggagggacgcgggtccggccccgcgggcgggagtaactaagggatggccccgggccctggcgggaaggccgggccagagcctgggggcgggatgcggacgtccgcagggtcgccgcttcggttccagaggccacacggccgggcggggcgtgagggacagcccgaggactacaggtcccaaggttccccgcgccgcttccggggcacggtggcgtcccggcaccgcggccgcagtgaggagactcggccatgctacgcgcgctgagccgcctgggcgcggggaccccgtgcaggccccgggcccctctggtgctgccagcgcgcggccgcaagacccgccacgacccgctggccaaatccaagatcgagcgagtgaacatgccgcccgcggtggaccctgcggagttcttcgtgctgatggagcgttaccagcactaccgccagaccgtgcgcgccctcaggtgtgcggccggggggaggtggccgcccgcgcgcgctggtgacggtgggagtgggcggagagggtgctgattcctggcgcgtctgcacccaggatggagttcgtgtccgaggtgcagaggaaggtgcacgaggcccgagccggggttctggcggagcgcaaggccctgaaggacgccgccgagcaccgcgagctgatggcctggaaccaggcggagaaccggcggctgcacgagctgcggtgcgtggggcgggaggcggggcggggcggcgcggcctggccggcctgggagaagcccgggccccgctcagcctcggccctttgaccctcacaggatagcgaggctgcggcaggaggagcgggagcaggagcagcggcaggcgttggagcaggcccgcaaggccgaagaggtgcaggcctgggcgcagcgcaaggagcgggaagtgctgcagctgcaggtgggcaacgtctccggagggtgggactccagccggggacgcggcttgcggggcactgggaattctgggcaccgcgacgcgggcgctggctatgtgcagagacttacagttggcaggtccggatttggagaggagagtgccagtcaggcgcaaagacccggaggtgagcggagtaattggacagtgttcaggtacctagcaggtctgtgggagggaccctgcgttccacaaagaggttgtattttgcataacaggtgatgaagccatgaagggttaagtatttcaggctaggattagcaggtgtgcgacttaaaagcagggagaccacttaggagtaatgcagtgagaatggatgaggcttgatttaaagtatagaagggtggctgggagcggtggttcacgcctgtaatcccagtactatgggaggccgaagcgggcgtatcacttgaggtcgggagttcgagtccagcctggccaagccccgtctctcctaaaaatacaaaaattagccgggcgtggtgtgcgccagtaatcgcagctactcgggaggctgaggcatgagaatcgcttgaacccaggaggcagaggttgcagtgagccgagatggcgccactgcactccatcctgggcgacagtgagactccgtctcaaaataaataaataaataaataaataaagtaatggggggaaggatgagttagagtgattcagaggggaccactgagggacggatttcacctaccaggacgtgagattttcatagctggcactcggggctatggctgaagtgtctgagaaaagaggaacgtggaaaagcaacctgatatcactccactgggaggccagaggggctctcaaataggacctgggttccaggcatgcttccccagggagagcaggagctgctttctcagtggggtgagaggccagcaggctgggtgggctggctggcatgtgcccaaggctcctgttcagctgggcttttctctcccgataggaagaggtgaaaaacttcatcacccgagagaacctggaggcacgggtggaagcagcattggactcccggaagaactacaactgggccatcaccagagaggggctggtggtcaggccacaacgcagggactcctaggggcccagtaaggacagtgcccgccagggaccatgtatgtatcatggcggaagagttggccctgacctggaataaagcagttggtgttgcttatgaggaaggttcagccttatccagcacagccttcacgttttgccctctgctgtcaccacttggtcagaaacttccaaacgcagtgccctgttctgccggtgtgtacagcctcagcgcaccaggagaccctagagtggtttccatctcacagagaatcagacagggccacagccccctcaggcagccaggtcatctgagtatcattaagagtagtgatgggaagattacagtctgagggccaaacgtgcctgcttcctgtttttgtaaataaagttttgttggaacacagccacacccactcattgacttctttttactacagtggcaaaggtgagtagttgcaacagagaccatatgaatcccaaagactaaaatctttaactttttacaggaaaagtgtagtgatctctcatctggagctttaggactctagcctgtgtcacccaggacctgagccacaagctaaccattggccaggcgcctgcctctgctctatactgtgctttgctggccagagtctggtgtatccaagacccagaaggcaaagaggagaccccatttttttctgggttccacaaagaggttgtattttgccttacaggtaatgaagccatgaagaattaaatattctaggctaggattagcaggtgtgtgacttaaaagcagggaggccattaggagtgggtctctccacccatggcctcagtgacctacatttgccctggcattgccattgcccttgggccacccagcagatggctgctggcaggggagacatggttgaccaagattttatgaggttagtgtggcttagcaagcacttggaccaacctctatgggtactgggactacctgtgatgatgaagagagtatatagatccatagtccctgttcagatgcaggccctcaagcagtgtctgggatgagctggaggaatgtttctcaaccagagcagcttccgtttgctgccatgcacatgaactccagcttctctccatgtctcccacttctttgcagggaaggcctagggacccccaagaaatgaaaacctttttttttctttcttttttttttgagacagagtctcactatgttgcccaggctggagtgcagtggcacgatcttgctcactgcaagctctgcctcccgggttcacgccattctcctgcctcagcctcccaagtagctgggactacaggcgtctgccaacacgcctggctaattttttatatttttagtagagacgtagtttcactgtgttagtcaggatggtctcgatctcctgacctcgtgatccgcccgcctcggcctcccaaagtgctaggattacaggcgtgagccaccgcgcccggccgaaatgaaaaccttttagggtgtatgggccactcttattgcaggtgagaaagcaggtaataaggtacaagcagaggtggtgcctggcacccagccctcctcagagcactgcactcctgagaaccttggcctccctccttaggctggtactagctcttctcccccagcatcaactctggccagagcacagtggcatccctgcttttaggtgcgaggcatctggagtgagacctgatgggcacacgtgggcagtggtttgatgatgtcttccatggcctcgggcttcgtcatggtgaagagtgggccatctggacccctgcattggaagcctttggtgatgtggcacataggcctgtgttaggaagtccagttttatgtaacgtactcctccctggacctccttgtctccatcttccagttttattctttccaaggcctctgtaccgggatccagacgtaagccatctgtctgttcagacagaggacacactgaccttgaagctctgtctttgggctgattccactgctgtccagcatggggctggaactcagcattcactgctgatgctgttatgtcatgcagaaccacctgggaaccaagtgtcacgtttttattctctacccacagccaccttgctggtgtaggcaccactaggcagcttactggtaccttcagggttaactcaaacccagtgccatctgtacctgcttctaatggaacattgagtgcagccaggtgcacaggtagcctctcagatcccaaccagtccaggttgcagagtcatgtgatgccccagggtagtgatgcctgatctccgcagaaccctggatagttaacctgatgggcatggccttgctcaaaacaccagggtctcttcagatccttacctcaagttcctagtagggcttggatctgttacagacaatgagctctgcaaggttttaagggggagagttgccagaatcatgctgcagcctggaccaccaagagaatatcttgctcaaggctccacttgtgggtggtagatttggggtctagctggtaaatgcatttggagcagaacacccaaatgtaagtgctttcactaagatgggaggaggtccaccaggctttgtgggatagacaggatggaccagcaatttgtgagtggcaagtttttcccgaaggacccaatcaagtatagatgttttaccacgaaacgggattcttgccccttccagttgtctagaataagcatgatgtcaatgactggcccccgcatgttgtcctggagatgggtggtgtaggtcttgaggatctggttatgcaaaactgtagagttgttaatctctcgggctgaattgtgaaggtgtgctgcttctaggtgaaggcaagctgcttatagtggtccaggtgggtaggacaagagaagaatgcatttgcccaattaatctgttccatcaaggagaccaccctagacgtcattacacctaaagtcattcctcatatttttccaacatactccaaattttccgcatggaacaatcacagttatccagtattccctgaaatctttgggaaatgttacctcctgcacttaccctgtggttatttccccaactctgacaagtacggagttgaaatggacaactaggaaggaaggccagctgactgctgaaataagagcaactttggcagaaagggttaagtttggaattatttttctttcccaaataggaagtcaagagtaatattgcaatcccaaaaacctgagacaggcaggcctagccatgatgctgtcatttcccctgtcaggtgctttagtgaatatttccttagtgcaggtaggcgcataaacaatatatgtgatgtttttataaagggaacactaccagagtcagcctcatggttcagtttacaggacctcaaagtcaagaacttgaagaatcccaccatagtgccacaaaagggcccaggaaagtgacattaaaaggtcagagctgtggccgggcgcggtggcttacgcctgtaatctcagcactttgggaggcggaggcaggtgaatcacctcaggagttcgagaacagcctggccaacatggtgaaaacgcgtctctactaaaaatataaaaaattagctgggcatggtggcgcctggaatcccagctggaaggctgaggcaagagaatcacttgaacctgggaggcagagattgcagtgagcccagatccactgcactccaggccaggtgacagtacaaaaaaaaaaaaaagtcagagctgcataagccccagtcttatgcggtactccacagtggctctgtggtcacaacaatcctccccaaatgcatttcccctcactgagagtgaaaacacaggtgtgaggttgaagttctctgggaatttgtgttacaggtcacttttttgttttttttttttaatgctggctactgagggagagaaatggtctgggagtgaggttgtgtggctgggaaatctgaaacagatacaaacgtcaaccatgcctactacacagccttctggcactaccagtcagtgcccccaggtgctattgctggcacccctgctgctgctgttggaactgcaggaatgtaggtgcccactacagctgccagaaatgccccagaagcgagaaaagtgaatttgcccttcctctggccttaaaaatctttccctgggccaggcacggtggctcatgcctttaatcccagaacttagggaggctgaggtgggtggagcaactgaggtcaagagttcaagatcagcctggccaacatggtgaaaccccgtctctacaaaaatacaaaaattaacctggcgtggtgacacgtgcctgtaatcccagctacttgggaggctgaggcaggagaatcgcttgaacccaagaggcggaggttgcagtgagccgagatcatgccattgcatgccagcctgggcgacagagcaaaactctgtctcaaaaaaaatctttccccaggccaggcgcagtggctcacacctataatcctagcaatttgggaggctgaagcaggtggatcacttgaggtcaggagttcgagaccaacctggccaacgtagtgaaactgtgtctctactaaaaatacaaaaattagctgagcgtggtggtgcacacctgtaatcccagctactggggaggctgaggcaggagaatcgcttgaacccaggaggcggaggtgcactgcagcctggacaatggagagagactccatcacccccacccccccaccaaaaaaaaagaaaacagcagtttataaacagatattctacatccctcttcgcattgtttatcaggactgtcattttcttgtatgagacatttgggttttttccctctgaatatgttactactgtgacatttagcccttagaaaaaaatgttaggccaggtacagtggctcacacctgtaatcccaacaatttgggaggctgaggtgggaggatcgcttgagcccagaagtttgagactagtctgggaaacatagggaaacccatctctattaaaaaaaaaaaaaattaaaaattagctgggcatggtggtgtacacctgtggtcctagctacttgggaggctgaggtgggaggatggcttgtgcctggtaggttgagactgcagtgaaccatgatcacaccactggactccagcctaggcaacagagcgagaccctatcttcaaaaaaaagaggaaaagaaaagaagttaacaaatgttcagtatttcagttacttcctgacctggtgatatttaagggtgtgtttgtttttggatgatctttgcaaatatattaactactgttaaggggaaaagctgcttcggcgacttgagctgattgagtcacacttctgggctctctgggcccttttgtgagtttataatagaaataaaatatgactttataaaaaaaatccccaagagagatgggagagtatttaaattgttgccccatttactgcttctacccagaaatccatataaataaatcaaaaaaatagatttatggtaacaagcctgatgcaacctgcttgggtttaaatttgaatcccagcttctccctcttactatctgcatatctttgagaacatttcttagtccctctgtgcctcagtttcctcaaaagtaaaatagagattaaacaatactagtatgtacctataagggtattgtggcaattaaatgagaaactgatgtaaagctaagctcactgactgcaacacagtttgtgcttaatagatgttacatgttattcttttatttatttatttatttatttattttgagatggagttttgctcttgttgcccaggctggagtgcaatggctcaatctcggctcactgcaacctctgcctcccgggttcaagcaattctcctgcctcagcctcccaagtagctgggattacaggcatgcaccagctaatatttttgtatttttagtagagacagggtttcaccatattggtcaagctgatctcgaactcccaacctcaggtgatctgcccaccttggcttcccaaagtgctgggattacaggcgtgagccaccgcgcccagccacgttattattattattattactattattttagggaaaccagagaatagtcttaaactcacatcatagactgagaagaattaactgccaaataacactcacgcagggaatgaattgctggaggagaccaagacctgccctgcagctccccttatctccagcagagggcagacgcatcaagatagtgacagggccctcaaaaatggaaaggataagattggtgaatttgactttttttttttttttgagacagagtctcgctattgttgcccaggctggagtgcaatggcttgatctcggctcaccccaacctccgcctcccaggttcaagcaattctcctgcctcagcctccccagtagctgggattacaggcacacgccaccacgcctggctaattttgtatttttagtagagatggggttcctccattttggtcaggctggtctcaaactcccgacctcaggtgatccacccgcctcggcctcccaaagtgctggaattacaggcatgagccaccgcgcccagaccgattacattatttaagaaataaacttaacaagccgggtgcaatggctcatgcctgtaatcccagcactttgggaggctgaggcgggcagatcacctgaggtcaggagttcgagaccagcctggccaacatggcgaaaccaagtctctacttaaaatacaaaaaaattagccgggtgtggtggcactcacctgtaatcccagacacttgggaggctgaagcaggagaattgcttgaacctgagaggtggaggttgtggtgagccgagatcacgccattgcactccagcctgggcaacagagtgagactccgtatcaaaaaaaaaaaaaaaaaaaaaaaaaaaagtaagttgcagacatcaagacacttcatctctcaatacttaagcatatatttcttcagaacaaagtcattttcagcataagcatagggctattatctacccaagaaatcaaacgaaaactctccgttgctccccgctccccagcccttggcagctaccactcttctttttttttttttttttttttttagaaatagggattgggtcttgctctgttgcccaggctggtctcaaactcctaggctcaaatgatcctcccactgtggcctcccaaagtgttgagattacaggcgtgagccaccacacgcagcctccttccttttgaaggctgagtaatatttcacagtatgtacatgccacatttatccattcatccattcatgaacgttgggtttcttccgcctgttgcttactgtgaatactgctgctacaaacatgggtgtgcaaatacctcctcgagcccctgctttcaattcttttggatacgtacacagaaatggaatttctggatcatataattttattttaaatttttaaggaacaaccatactgtttttccatggcagcggcaacattttaaattattaccaacagtgcacaggggggttccaatatcttcacatccttgtcaacacttgttattttctgggtttttgtttttcgggttttttttttttttttgacagattcttgctctgtcacccaggctggagtgcagtggcacgatctcagctcactgcaacctctgtctcccgggttcaagtgattctcctgcctcaacctccggagtagctggaattaggggcacccaccacaacacccgactagtttttgtattttttttttagtagagacggggttttgccatgttagccgggctgatctggtctcaaactcaagacctcaagtgatccacccgcttcagcctcccaaagtgctgggattacaagtgtgtttttagaatcagtttgtttatatctataaaaatttctgctggaattttgataaggaatgtgaaattgttttatcaattagatgttgttttacgacccacaatatagtatcttagtgaatgtgttccatgtgcttttttctcttccatgtgcttttttgaaaagaatgtgtgtttttttgtttgtttctgttttttgtttttttgagacagagtttcgctcttgttgcccaggctggagtgcagtggcatgatctcagctcactgcagcctctgcctcctgggttccagcgattctcctgcctcagcctcccgagcagctgggattacaggcacccgccaccacgcctgggtaatttttgtatttttagtagagatggggtttctccatgttggtcatgctggcctcaaactccctacctcaggtgatctgcccacctcggcctcctaaagtgttgggattagaggcatgagccaccgcgcccggccaatttacatatttttttattatgtatctcttaacaaactgctatggctattattgttttgatagatttgtcttttgggcttcatactagagttatgagtggattgcattccacatacaatattaggctattaaataggtttgtgtacttaattttaccaataggttttatactttcaagtgttttttgggaagaggagagggtcaaatctgttctttggccttcctgtaactggatatttatatctttctcaagtttgggaaagttttctgttattattctttttttggagacatggagacaaggtctcactctgttgcccatgctgtagtgcagtagcacgttaacagctcactgtagctgtaaactcttgaactcaagtgatcctccctgcctcagcccccaagtagctgggattacaggtgtgcaccacctgtaatgcctccctaattttttatcttcttttttgtagagacaaggtctcactatgttgcccaggctggtcatgaactcctggccttgagcaatcctcctgcctcggcctcccaaaacattggaactactggcacgagctaccataccagcttgttattacttctttcaataagctttcttctaccccttgctcttgctcaactccctcttgaacaccaataattcttagatttggtctactgaggtagttttctacatcttgtaggtgatcctcattctttttcattcctttttctcctctcattatgtattttcaaatagactatcttcatggcccgttgtggtggatcacgcctataatcccagcactttgagaggccaaggcaggcggaatgctagagctcaggagtttgagaccagcctggccaacatggcaaaaccccatctctactaaaaatacaaaaaaattggccaggcatggtcagtggctcacacatataatcttagcactttgggaggctgaggcaggcagatcacctgaggtcaggagttcaagaccagcctggccaacatggggaaaccccatctctactacaaaaatcagctggggcgcggtggctcacgcctgtaatcccagcactttgggaggccgaggcgggcggatcacgaggtcaagagatcgagaccatcccggctaaaacggtgaaaccccgtctctactaaaaatacaaaaaaattagccgggcgtagtggcgggcgcctgtagtcccagctacttgggaggctgaggcaggagaatggcgtgaacccgggaggcggagcttgcagtgagccgagatcccgccactgcactccagcctgggcgacagagcgagactccgtctcaaaaaaaaaaaaaaaaaaaaaaaaaaaaaaatcagctgggcatggtggcaggcacctgtaatcccagctattcgggaggctgaagcaggagaatcgctggaaccaaggaggcggcggttgcagtgagctaagatcgcaccactgcactccagcctgggcaacaagcaagactctgtctcggggaaagaaaaaaaaaaagatttgtacactttgtgaaatttttactcaagaaaagtgaaggagaaatatttcccaaggagaagatgacacagtgaagtgtgactgcataaatttggccacgaaggtagaaagggcatcacatgaatgcccggtcttctgtaaatatgtgtgttgttcttatagtaataccaaaacagtttgtcttttttttttttttctttttttttgagactgagtcttgctctgtcacccaggctggagtacagtggtgcaatctcagctcactgcagcgtagacctcccaggctcaagcgatcttcccacctcagcctcctgagtagctgggaccacaggcgcatgccaccactcctggctaattttatatttttttgtagagacagggtttcaccatgttgcccaggcaggtctcaaactcctgggctcaagtgatctgcccaccttggcctcccaaagtgctgggattataggcatgagccactgagcctggcagattgtcttttcaccaaaaaaatgatggacaagttactgtaccttgcattctttatctctaaaaaggagacatgttgcatggtgaacctctgaattttggagtcaacactggccacatttgaatgttctgctcgtcaggactagaagtgctgccagctttgaggggcatttagggcaagagaagacagcttaagagatccagttgcaaggcaggccactctgtactttgggccttatgatccagtagatccagtagaactggtactcaagatgtccacagttaaccagaatgctatgtggacctgtagtaagcttcagtggatactcacatcagaagtcccttgggtttgttttttgttttttgttgttgttgtttgtttgttttccttttttatgttgagacggagtatcattctgtcacccaggctggagtgcagtggagtgatctcggctcactgcaacctccgcctcccaggctcaagcaattctcctgcctcagcctcctgagtagatggaactacaggtgtgcaccaccacacctggctaatttttgtatttttagtagagaggggtttcaccatgttggccaggctagtctcgaactcctgacctcaggtgatcctcccacctcggcctcccaaagtgctgggattacaagtgtgagaaaatatatactttttttgtttgtttgtttgtttgagacagagttttgctcttgtcacccagactggagtgcagtgacatgatctcggctcactgcaacctccatctcctaggttcaagcaattctcctgcctcagcctcccaagtagctgggattacagacgcccaccaccatgcccagctaatttttgtatttttagtggagggtttcaacatgttggccaggctagtcttgaactcctggcctcaagtgatccgcccaccttggcctctcaaagtgctgggattacaggcgtgggccaccgtgcccggctgagtatactctatttttatttgtcaattatacctcaataaagctgggggaaaaaaactgaaaaaatactggtcatgaattatttttctttggtggggctaccattctctcccactccactggctgtgtggaaatagcccacacatcggttgcaggtgcagaggacatctgaggacaggctcgccctgcccaccaccattgccactggtgcccgagcatgccttccagggcctggggatcaatccatcctatctgccactgccagtgcccatgcacaccatctggggggctgaaaacaggcctgccctgcccttcaccaccaccattgctgccagcacctgtgcacatcatccaggggcctgagattcaatctgcccagcccaccaccatcaccacccgtgtgcaccatccaggggcctaagggtcccaccctacctactgatgtcaatgctagtacccatgcatgtcatccaggggtctgggggttgacctgcactgtcagcacacatgcacgccttccagggacctgaggatgggctcaccccacctactgctgccgtccatgtgtactgtccagagacctagggattgatccacccacttcactgccactggtgtgcatgccacacatgcacactgtccaggagcccaaggacaggtccaccttgcctaccactgattcctgtgtgcatctcccagaggcccaggcactggcccacccagcctgctgctgccagtcagtaccagcacgccacccaggggcctggggactggcccaaacagattgctgttaccaccaccctgtccaaaaaaaaaaaagacccaattgtatgctgcctatcagaaattcacttcacccgtaaagacacacatagactgaaaatgaatagatgaaaaaaaaattccatgcaattccataaaattggggaaaaaatgactgttataagtgactgatatcctgcatgcttttatttatttatttatttattttttgagacggagtttcgttcttgttgcccaagctggagtgcaatggtgcgatcttggcttactgcaacctctgcctcctgggattacaggcacccgccaccacacccagctaatttttgtatttttagtagagacggggtttcaccatgttggccaggctgtacttgaactcctgacctcaggtgatctgcctgcctctgcctcccaaagtgctgggattacaggtgtgagccaccacaccggccttgcatgctttcagtttccaatcatttggaagccaaaattattggaacagtcattaatagcctactatataacaacaaatgcctacatcaaaaaaagtaggaagacttcaagtaaacaacctcatgatgctcctcaaggagctagaaaagcaagaataaaccaaacccaaaggaaagaaacataaagatcagagcagaactaaacagaatagagactaaaaaagggaaacaaagggtcaatgaaataaaaacttgttttttaaaaaatataaacaaaatccacaaacctgtgcttggtgtgtgagaaaaaaaaaaaaaaaatcaataagccactaccaggactaacctagaaaaaaagagagaagacccaaataaaattagaaatgagaaaggagacatacaactgatatcacagaaatacaagggatcattagaaactattatgaacaactatacactaacaaattggaaaccctagaggatatctatgaattcctggacacaaacaacctaccaagattgaaccaggaaaaaaatagaaaacctgaagagatcaatgatgagtaaccacattgaatcaataattaaaagtctctcaacagagaaaagctcaggaccagatggctttactgtggaattctaccaatttataaagaactaacacccattcttctcaaactattcctaaaaattgaagagaatttttttctaactcattctatgaggccagcgttacccagacaccaaaaccagactaggacacacacaacaacaaaagaaaactacaggccaatatacctgataaacatagatgcaaaaatcctcaacaaaatacagttgatccttgaagaatgtggaggctatggatgccaaaaccctgcacactagaaaattcacatataacgtttgacccccccaaaacttaattactaataattaagtgaaaggcctttacaatgaaaactataagacactgataaaaaaaaattgaagtccgggcgccgtggctcacacctgtaatcccagcactttgggaggctgaggcgggtggatcacaaggtcagaagttcgagaccagcctggccaagatggtgaaaccccatctctactaaaataaataaaaaattagccgggcgtggtggcaggcgcctgtagtcccagctactccggaggctgaggcaggagaattccttgaacctgggaggcggaggttgcagtgagccgagatcgtgccactgcactctagcctgggcgacagagcaagactccatctcaaaaaaaaaaaaaaaaagaaaaaaaattgaaaaggatacaaacaaatggaaaggcatcccatgctcatggattggaagagtattgttaaatgactgtactactcaaagcaatccacagattcagtgcaatccctatcaaaataccaatgacattcttcacagaaatagaaaaaacaatctgaaaatttgtatggaaccacaaaagatacttaatagccaaagcaataatgagcaaaaagaacaaagcttagaggtaccacaccacctgacttcaaaatttactacaaaggtgtagtaatcaaaacagcaggctattggtataaaaatagacacagaccaatagaacagactggagaatccagaaataaatccatgtgtttacagtcaactgatttttgacaaaggcatcatgaacaaacactggggaaagaacatcctctttaataaatgatgctgggaaaacaggatatccataggtagaagaataaaactagacccctatctctcacaatgtacaaaactcaactcaaaatggcttaaagacaaacataagacctgaaactataaatctactagaagaaaacatagggaaaacacttcaggacgttggtccaggtaaagattttatggctaagacttcaaaagcacagtcaacaacaacaacaacaacaaaatagacaaatgggaatacagtcaactaaaaagcttctgaacagcaaaggaagcaatcaacagaaacaacctgtagaacaggaggaaatctttacaaaccattcatctgacaaggggctaatattcagaatatacaaggaattcaaacaactcagcagcaaaaacataaacaatcccagtaaaaagtgggcaaagggctgggcgcggtggctcacgcctgtaatcccagcactttgggaggccgaggtgggcggatcataaggtcaggaatttgagaccagcctggccaatagggtgaaaccccgtctctactaaaaatacaaaaaattagccgggcctggtggtgtgcgcttgtaatcccagctactcgggaggctgaggcaggagaattgcttgaacctgggaggcagaggttgcagtgagccaagatcatgcctttgcactccagcctgggtgacaaagcgagactgtctcaaaaaaaaaaaaaaaaaaaaaaaagtggccaaaggatctgaatagatatctcaaaagaagacacgcatgcttgagcctagaagttggaggttatagtgagctatgatcgtgccactgtactccagcctgggcaacaaagtgagactctgtctctaaaaaataaaataaaaggccgggcacagtggctcacacctataatcccagcactttgggaggccaaggcgggcagatcacaagatcaggagatggagaccatcctggctaacacggtgaaaccccatctctactaaaaaatacaaaaaaaattagccagtcgtggtggcaggcgtctgtagtcccagctactcaggaggctggggcaggagaatggcgtgaacccgggaggcggagcttgcagtgagccaagattgggccactgcactccagcctgggtgacagagcgagactccatctcaaaaaataaataaataaataccctgcccggccgccgccccgtctgggaggtgtacccaacagctcattgagaacgggccatgatgacgatggcggttttgtcgaatagaaaagggggaaatgtggggaaaagaaagagagatcagattgttactgtgtctgtgtagaaagaagtagacataggagactccattttgttctgtactaagacaaattcttctgccttgggatgctgttaatctataaccttacccccaaccccgtgctctctgaaacatgtgctgtgtccactcagggttgaatggattaagggcggtgcaagatgtgctttgttaaacagatgcttgaaggcagcaggctccttaagagtcatcaccactccctaatctcaagtacccagggacacaaacactgcggaaggccgcagggtcctctgcctaggaaaaccagagacctttgctcaggtgtttatctgctgaccttccctccactgttgtcctatgaccctgccaaatccccctctccgagaaacacccaagaatgatcaataaatactaaaaaatttttttaaaaataaataaataaaaataaaataacataaaaaaagacatacaaatggccaacaggtatatgaaaaaattgctcaacattagtaatcatcagaaaaatgcaaataaaaatgacaatgaggccaggcacagcggctcacgcctgtaatcctagcactttgggaggccaaggcaagcggattgcttgagctcaggagttcaagaccagcctgggcaacacggtgaaacccccatctctacaaaaaatgcaaaaattagccaggcatcgtggctcacatctgtaatcacagctactttgtgggctgaggcacgagaatcacttgaacccgggaggcagaggttgcagtgagctgatcatgccactgcactccagcctgggtgacaaagtgagaccctctacaaaaaatacaaatattagccaggcgtggtggtgcgcacatgtagtcccagctactctggaggctgaagggggaggatcacttgagcctgggtggtcaaggctgcagtgagctgagattgcaccactgcactccagcctgggcaacaaagtgaaaagaaaaaaaagaaaaacaataaacaggaatgaaacaggaatgaactactgtaaccgcccaacaggttcaccttacccactgcctagacagccaatttatcaggacaggggaattgcaatacagaaagagtaattcactcagagccaggtgggcaggagacagaagtttcattattgctcaaaacagtctctctgagcattcaggaatcagagtttttaagaataatgtgctgggtggcggggcagtcattgggtcaggagtgtttattggctggggtggagaagaagctgtcctcttgcattgagtgagttcctgggtgggggccacaatatcagatgagccagtttattgatctgggtggtgctaactgatccatagagtgcaggtctgcaaaatatctcaagcactgatcttaggtttgacaatagtgatgctatccccaggagcaatttggagagggtcagaatcttctagcctccagctgcatgactcctaaaccataatttctaatcttgtggctaatatgttagttctaccaaggcagtctagtccccaggcaagaaggaggtttggtttgggaaagggctgttactgcctttgttttaaactataaactatgtactaagttcatcccaaagtaagttcagcctacgcccaggattgaacaaggacagcgtggaggttaaagcaagatggaactggctaggacagatctctttcactgtctcagctagaattttgcatcggtagtttcactactgatacacaaaataacttggatgaacctcagaacgccagacataaatgatcaagtactgtattgttccatttaggtgacatttctagaaaaggcaaatctttatcagtggtttcctgggggctggggtgggagccagcagtaaggcaaatgggcatgggggaacttgacatggggacagagtattctaaaactggattgtgggagtggctggacaactgtttgaatttaccaaaaatcaccaaacagtacgcttagagtgcgtacaaattacgatctgtaaattgcacttcactggagttttttaaataaagaagttcaagtttcagtccctcccttacatgtcctttggcatctggcacacttcctcctccgtgaaaccctgtcctcagacccctgcttgtttccccctaccttgcttagagtgggatccttggtcctcttctccatctgtcctgccccagggtgatgtcactctggtggggcctttaaatattggtactggctgggcgcggtggctcacgcctataaccccagcactttgggaggccaaagcaggcagaccacctgaggtcgggagtttgagacctgcccgaccaacatggagaaaccctgtctctaccataaatacaaaattagctgggcgtggtggtgcatgcctgtaatcccagctactcaggaggctgaggcaggagaatcgcttgaacccgggaggcagaggctgcagtgagctgagattgtgctattacactccagcctgggcaacaagagcgaaactgtctcaataaataaataagataaataaatattggtactgaccattgcttcagcctagacctctctcctgaactccagacacacctccaaatgcctgctcaggttcttcttggatgtgtagcgggcatcccaaacatgacaggtccgcactgagcccctgctcttcccaactcaaatcagtgccaccctcaggttcccatgccagctgatggcaccttcatccttcccattgctcaagccagaaatcttgttttgtttttgttcttgtttttgagacagagtctcgctctgttgcccaggctggagtgcagtggcaccatctctgctcactgcaacctctgcctcccgggttcaagtgattcccctgcctcagcctccttagtagctgggactacacgcacacgccatcatgcctggctaatttttgtattttttagtggagacgaggtttcaccatgttggccaggctggtctcaaactcctgacctcaggtgaccccccagtcttggcctcccaaagtgctgggattacaggcatgagccactactcctggcccagaaatcttttttttgagacagagtcactgtttcacccaggctggagtgcaacggtgctatctcagttcactgcaacctctacctcccaggttcaagtgattctcctgtctcagcctcccgagtagctgggaatacaggcatgagccatcccacccggcccagaccagaaatattgaagtcatcttcgactcctctttttctctcccactcacatccaatccatcagcaaactgcagttggtatctcctttaaaatgcaccaagaatcaggtcacttctcgacacacacattgcactcccattactcacagggattgctgcatagcctcctccctagtttccccacagtcttttttttttttttttggaaggagtctcgctctgtcgcccaggctggagtgcagtggcacgatcttggctcactgcaacctccacctcccgggttcaagcgattctcctgcctcagcctccagagtagctgggactacaggcgccagccaccatgcccagctaatttttttgtatttttagtagagacggagtttcaccatgttagccaggatggtcttgatctcctgacctcatgatccacccacctcagcctcccaaagtgcggggataacaggtgtgagccaccgcgcctggttccccacagtcttgtcacagcactatatccaaagttatcgtaagctggctcagaactccctctcattcccccatttcatttggaggaaaagcccaagccctgtgaggtgcagtcccacgttacctttccgatctcgggagttcagtcactctgctccaggaccactggcctccttgctccttgaacatgccaggcacattcctgcctcaggacctcagcacttgtcatttcctcccctccattacaggcagaatgctaaagtggatccctgaaattctcagcccctggtatctttctgtggattacacaatgattacctttgtgtaatcttttctggcttcatgtgggtagaacccatagctttttttttttttttttgagacggacagagtctcactctgtcacccaggctgaagtgcagtggcgtgatctcggctcactgccacctccacctcctgggttcctccacctcccgagtagatgggactaaaggcttccaccactgcgcccggctaaatttgtttgtattttttttagtagagacggggtttcaccatattggccagactggtctcgaactcctgacctcaagtgatccacccaccgctggcctcccaaagtgctgggagccagcgcgcccagccaaccacgctccagcctgggccacggagcgtgactcagtctcaaaacaaaaacaaaaacaggcgtggcccactgtgcccagccaactttcttctaaacattagaagaagatgacaaaggtgataaccacgactatactacgttatatggcaaaggtgaggggattctgcagatgtaatgaagacacctgatcaatccgagttaaaagggtggtgatccgtgtgggtctgacctaatcaggtcaggtgcccctcagaaaaggactccctgtgtgcttagacttgaagcagcagagactctctctgttcctgaccttgaagaagcaggccaccacgagtttgacagctgcaaggaaatgaattctgctaacaatcacccgggctctggaaatgaatgcagcctggctgacaccctgatcgtagccccagagcaaaagacccagctaagccatgcctggcccaatgtaataagcaaatgttgttttaagctgccaaattgtggtagcttttgtgtttttgttttcgttttgagacagagtcacgctccgtcgcctaggctggagtgcagtggcatcatcctagttcactgcagcctcgaactcctgggctcaagtgatcttcctgtctcagcctcccaagtagctgggactgcaggtgcatgccaacaaacccagctaattttttaaaaacattttatagagcctgggtctccctatgttgcccaggctggtctctaattcctgggcttaagtgatcctctcgcttcagactcccaaagtgctgggattacaggcacaagccaccgtgcctggcctgtggtaatttgttacacagcaacagaaaaccaatgtcccctcagatatctgcatggtttattttctcttcttcacaaagaagtctacactgaccaccctcggtgaaatcgcaacaggcctcccttttatctctgtagcacttactaatctactgcaatatgtatgttgttactgaagtatgtttattgtttatacttgtttcctaactaactgaaatgtgtttattgtttaacatctctcttcctccactagaatataagccccatgagggcagaggtttttgtgttttgttgctgctgtttccaggcatttgtaatgggacccggagcatcttcagaagaggggttgttgaacaggtgaagggatgcagcccatctgggggacataatactatggtaatttatgcacatgtgttagcttaagtgaggtcatcgtgcccacagagcaggtgagagacctctctgggccactgctgggtcaggcccttggacttctaggccctgaatgccaataagctaatctgggtgagagaggactggctgctgatttgtaatgcaggtcagcctgaccggctcctgggtgctggacagctcatgccagtgactcatgccagtgactagggtcagatgagctctgtgacctgcttggccccatcagcctcttcaccttcctcaacaagagggcaggagagtctggagctgtcccgttctcttctcccaggggtcggggactggcccaccagtgaggctggtctctcacagtgcttctcatttcttccattctgcctcaggttgggttccctacaggttgggttccctagagagcagacggagatggtttcacaaagggggtttttattacagaaggccctggggacccacacctttgggagggaggggtcaaaaataggagtgagcagagggagaactgctatgcagaccacagctgaccccatagggagctctggagccaaaatgctccttcagagttatcctgcatttgggccaaaatggaccagtcattggatgcgggccacctgggaagggtgtgaccctgagccaggcagctctctgcagctgaagcaggctctcgaggagctacccctgagggccacctgcagagggcactcccagcagctgggtggcaggtgctttcacaaagggagagttgagcagcgcctttcctttcttgttcatgatatctaccaatacctctcccactggggtaatccatcttttcttttaattattttccttttgagatatattaaaaatgcaaaaaaaaaaatttttatttttttgagacggagtctcgctctatcacctaggctggagtgcagtggcatgatcttggctcactgcaacctccgcctcctgggttcaactgattctcctgcctcagcctcctgaatagctgtgattacaggtgcctacctcacgcccagctaatttttgtatttttatatttttagtagagatggggtttcaccatgttggccaggttggtcaaccaccacgcccagccaaaaaaaattttaatgtcgaaaatgagagaaatagaattacaaaagaaaccaattacagggccaggcacagcagctcaagcctgtaatcctagcactttgggaggctgaggcgggtggatcacctgaggtcaggagttcgagaccagcctggtcaacatggtgaaacccccgtctttactgaaaatacacaaattagccaggcgtggtggtgcatgtctgtaatccaagctacttgggaggctgagacaggagaatcgcttgaaaccaggaggtggaggttgcagtgagccaagatggcgcccgccattgcactccagcctgggcgacagagcgagactccgtctcaagaaaaaaatatatatatttatattcagatatcaaaatgttaaaacactttttttttttttgagacagggtctcgctctcgctctgtcactctggctggagtgcagtggtacgatcacagctcactgcagtcttgaattcccaggcttaagcggtactcctgcctcagcctcccaagcagctgagactacaggagcacaccaacacgcccagctaatttttgtattttttgtagagttgggggttctcgctatgttgcctaggctggtcttgaacttctggtctcaagtgatctgcccacctcagactcccaaagtattgggattgcaggcgtgagccacagcgcccagccaaaacacattttgatggtgtcataaacgtgcttctttaaccattagatagcaagatctggtcgtggcccaataactgtgataattttgaagatataatgaatctaaacagtatatagaggcatttgtgacagctgtgataggaagttatcttctattttgatttgtgacaaagccacaggtattgctaattctgctgtggtttgttgcctaatttatagtgaaaggaaaggtggaatatcagttacagattagagacagatgtgatctcttcctatccaagtttcaggtgcagggaagtgggtgttgctgtgtggtgagggtgaagaggttttctggaaatttgggtttaggaagaggaaatgttcctaaaagaggggacaatgatccacatgcgtggtgggccaagagggtgggcggatcctgccagagcctcctcccacctggaggggtcccagcgtccaccttccctgccccagcccccctcctcgaggtactgggaggctggataaagtcttcggctgggccacaccccaccccaaattctccctgtcccaccctagtggcccaggccaccccggcctgctcccttccgcaaggcacctcaccttctgtgcccagaccattagccaacgcggtgaccttgaccccggcccaggccctgctaatgaagaggaaagcccgtacgcactcggcctgacccacggcgaccctctgtgaccaatcatactaccaacctcttaaacagagctccaccgacgcaatgcccaggcataaaaaggccaggccggagagaccgccaccagtcacggaccctggacccagcgcacccgcaccatggccggccccagcctcgcttgctgtctgctcggcctcctggcgctgacctccgcctgctacatccagaactgccccctgggaggcaagagggccgcgccggacctcgacgtgcgcaaggtgagtccccagccctggtcccgcggcgctccggggagggagggacccgcagccacaggggcgcgccccgctccggcctcgcctgagaactccaggagctgagcggattttgacgccccgcccttgaccgcggtcgaggcccccacggcgccccagcgcgtctcagccccgctgtcccgcccgaactccgaaccccggaccccagcatccttgcccggcgcaccccggccggcctcgcagggtcctccgagcgagtccccagcgccgccccggctcccgctcaccccgcccgtccccgcagtgcctcccctgcggccccgggggcaaaggccgctgcttcgggcccaatatctgctgcgcggaagagctgggctgcttcgtgggcaccgccgaagcgctgcgctgccaggaggagaactacctgccgtcgccctgccagtccggccagaaggcgtgcgggagcgggggccgctgcgcggtcttgggcctctgctgcagcccgggtgagcggggcaaggcgctccggggccagggggaggcgggcgggggtgcggccgggattcccctgactccacctcttcctccagacggctgccacgccgaccctgcctgcgacgcggaagccaccttctcccagcgctgaaacttgatggctccgaacaccctcgaagcgcgccactcgcttcccccatagccaccccagaaatggtgaaaataaaataaagcaggtttttctcctctaccttgactcgtgtctaagtgccagaaatgggacggggagggggcattgtgggactggaagatcgcgcgcgttggacctgtggcttgttgcgctcagagctggcccaggaagacgtgtcccggctacccgaggggacagagcgggtgctgttctggctgccaccaccctggaggggctggaagagggaggggcacaaaggctctgaggacgtggaaacagccccagcttcccgctcccagcctgggctgaggcctacagcaggctgcacctcaggggatctttcaaaattcaaaaagacgaggatgagggagcaaatacagacaagggtctgagcgggatgaccacaggaagcgggcagtgcacactgaatggcttcctgacccctgaaaggaggtttgagccacacttagaagttgagggagcggagcgggcctggggggagggggccctggggagcagctgaagggccaacatgtttccaaggagctggcccccaggaggccactggcacgctcagaagaggagcccaagctgccgggactgggcttgaatgccagcatgaccgtccctggtgtccccagggctgggtctgacccagcagctctactcctgcctgtgcaataaaacatgtcagggctggggaccccacaagcggacaggggatcttgagagcccagggccacagaaatgacatgaacaaagagaagctcttaacctctatctcctatcggtgaagcaaaagtatctgagacaggtctcaaacaacttaatcttttttttttttgagatcgagtttcgctcttgttgcccaggctggagtacaatgatgcaatctcacctcactgcaacctctgcctcccgggttcaagcgattcacctgcctcagcctcctgagtggctgggactacaggcacccaacaccacatcttgctaatttttgtattttcagtagagatggggtttcaccacgtagaccaggctggtctcaaactcctgatgtcaggtgatccacccacctcggcctcccaaagtgctgggatgataggtgtgagccaccgtgcccagtcaacgtttcaatcaatttagaaagctgattaagggccaggcacagtggctcatgcctgtaatcctagcactttgggaggcctaggcagtttgatgacctgaggtcaggagatcgagaccagcctggccaacatggcgaaaccccgactctactgaaaatacaaaaattagccgggggtggtggcaggtgcctataatcccagctacttgggaggctgaggcagaaaaatcatttgaacctagcggtggcagaggttgcagtgaaccgagatcatgccacttcactccgtcctgggcaaaagagcgaaactccatcgcaaaaagaaagaatgaaagaaagctgattaaggacactcctcaggaggtcccctgaggacatgtgtccaagcctggttttttgtttgagatggagtctcgctctctggctctgtcgcccaggctggagtgcaatagcataatcttggctcactgcaacctctgcctcccgggttcaagcaattctcctgccttagcctcctgagtagctaggattacaggtgcacatcaccacgctcagctaatttttgtatttttagtagagacggggtttcaccatgttggtcaagctggtctcgaactcctgacttcatgatctgcccgcttaggcctcccaaagtgctgggattataggcatgagccaccgcgcccggcctggttttatacattttagggagacatgagacattgattaatacatgtgagatgaacattggtttgctctggaaaggcaggacaactcgaaggggggttgtgggggtcccaggtcttaggtggataagagacaaaaggttgccttcttttgaatctttgttcagcctttcactgaaaacacaatttacatgtgagagtggggtagaggaatagtcgacttatgcctcagtctggctcagtgaatctgcatttttacataaacaatacggcagaaggagaaatcaggtatgcatttgtctcaggtgagcagagggatgactttgagttctagcctttgtcccgcacctgtgaagataagctatcaatttacattgccagggtgaattgaggctcacaggcaatttccctgtgggtaaattgtgaaggaagtatgtagctctttgtagtttcttaatgaaggaataaaataggaggcagctttgcctgactcagttcccagtttgacttttccctttgacttagtgactttggggtcttgcgatttgaaatttattaattttcctttcccacatctatccctgcatctagaccctgagaatcagataaaagcctagtccccagaacacgcccccatccccctgcccatgtcactgggcagtgcacttcagaaagcccacgcccactctctcactccgaagaaaacaggaacaggccattcctgtggcttcctcacactcaggagcaacagggcggggcagggagaatgaacccacaggtgcaagactgaaaaaatatactgaagagcaccgtaagatttccttcacaggtggtacaaaacaggccaaaaacctatatgggcctcgaggtttgggtgggcagtggctggaaaaggtgtcaggggcttcctgggtgctgcccagattctctttcttggcctgggagctggtgaaacaggtgtgctcagtttatgaaaatgcattaaactgtatacatgggattggttcacttttgtttgtaattaaacagttggccctttctgtccgtgagatgtacaccagtggaatcaaccaatctgggattgtaaatttatgaaaaaaaaaagtctctgtactgagcatgtccagatatttttgtcttctcattattccctcaacaatgcagtataacaacaattgacatgacatttacattgtattagttttgtgtttgtttgtttttgagacggagtctcgttctgtcgtctgtgctggagtgcaatggcgcaatctcagctcactgcaatctctgcctcctaggttcaagcaattctcctgcctaagcctcccaagtagctgggattacaggtgccccccaccacgaccagctaatttttttgtatttttagtaaagatgggttttcaccatgttggtcaggctggtcttgaacccgactagagtggatgatctggcacctcgacctcccaaagtgctgggattacagacatgagccactgcacccagccacagtgaggcttttgaaagccccagtggcctacggcacagtggaatggtttttgctggagctgtgaggggacacccctcttttgacctcacatcttggggtaaggaagaggggggatttgttatgcaaaggaacaagagattgactcaaagcggagaacgtggacttcttttcaaattgttcagaactatttgatacacagaaaggggtatttgaggaaagtggtcaaagttctgtggcccctcagaaaccacctggagagagaggggagcatctgcccacagagcacctgagggacccccccacctccactcgtatgggcacgatcctgcggatttgtgctttccaagctgcctgtccacctgccacatttgtgggacgtctgggcctcccactgggacctcactccttcctctgagtgccgcacattctctcccaccccagtggctctgatacagagcagaggggtgtccgcccagctttccccaccttgggagagacttcagggtcccctcacccccttaggcacccgcccactgggccattctttccctgggatccaatgcccgcagtgttttcttttgcagccttaaaacacagagggctggctgggcaaggtggctcatgcctgtaatcccagcactttgggaggctgagcgggggggatggatcacataaggtcaggagttcaagaccagcctggccataatggcgaaaccctgtctctactaaaaaaaatacaaaaattagccgggcgtggtggtgtgcacctgtagtcccagctactcaggagaattattgcttgaattgcctgaacccacgaggtggagattgcaatgagccaagatcacaccactgcattccagtccgggcaacagaagaagaccccatctctaaaataataataataaagatagtattctggcctccatagccatattcttttgttttatttttcaattgtttcagaacttgagggttatagttagttaaggtaaggttaggctgctataataaaaacatccaaatggtaaagagacactgtgggcttaaggaagataggtgtttatttccctctcttttctatcagcctgacacgaactttcctggttctgttccaccctgccatttaggacccagttttcttccatcgtacagttacgtcatcccctaggccttgtcactgcctgcatgcttcaggctggagggctgtggatgccacctggtggaaagagaaagagtatggaagggaagaggtgcacccactgtcttaaaatttcaagtgccggccaggcgcagtggctcacacctgtaatcccagatacttgggaggctgaggcaggagaatcactggaaccccagaggcacaggttgcagtgagcctagattgtgccattacactccagcctgggcgacaagagtgagactctgtctcaaagaaaaaaaaagatttcaagtgccacttttccttttactcaggttttagtgacaaaagcatggtcatgtggcctactttactgcaaaggaggcggggaaatatagctaagatttctttttttttttttttttttttttttgagacagagtctcactctgtcacccaggctggagtgcagtggcgcgatcttggctcactgcaacctctgcctccggggttcaagcaattctggtgcctcagcctcccgagtagctgggactacaggcacgtagctggaactacaggcacgtagctgggactacaggcaggcgacaccacgcctggctaatttttttgtatttttagtagagacagagtttcgccatgttggccaggctggtcttgaatttctgacttcaggtgatccgcccaccttggcctcccaaaatgctgggattacaggagtgagccactgcgcccagcaacaatttcatgaccctgaaagaagctgtggtagatagcaaaaacattaccgcaattctccacccctccctgtagccacatccacaatatgactttgcaatttctcccatcacgagaagtctatttctctactccttgaatcagttctcatccacctactttgaaatgtctccatggtggtttgtcacattgtggccaatggaatacagcagaagtaatgaatggcagatctaagctgagcctagaccccaagaagtcttgtacaccttgtttgttcttttgctcctctgtctcaccacaagaacaagctcaggctagctactctacaggaggatgagagaccatgtggagcagagtcagacctcagctgagctatcagctgctaacagatgtacgactaagttcagtcaagaccagtcaaatccagccagcttccccagaaccattcagacaacccatagagtgatgggaaataataattggtgtgtttaagccacctcattttgggagcagtttgttatccagcgtaactgtggcaatagatacatgatatggagggagaagagattttgatgaacaactagcattctcagccagagtattaggtaactggatactctgaactcctagcaatgacagtgtttatcttcttttgagaattatatgaacaaatttcccattgttgagccatctttccattcattaagaaatcctatttgcttatgatgtactcttcaatttagtcttctgcagtttatttactaatattattttttggatgtttgaacctaagtcataaattagactgttacataccttttctctgggctataattttatatcagttaggactgaacttattattaggttggtgcaacataataggtttttgccattacttttccacctacctatagtaagtaacagaaaacccagcagatagcaccgtgaatgaacagtttgttcatgcaactttcaggctagagagcagcattttaggactagtagtataaccattccacagtgccttcacaacccaacctgctctgcctccctgctgtgtcagccttagtgtacacctttcgtcctcatgtcacaaaactattacttgttctttttttgttgttgttgttgttgaggcagagtctcgctctgtcacccaggttggagggcagtggcgccatctctgctcactgcatgttctgcctcctgggttcacgccattctcctgcctcagcctcccgagtagctgggactacaggcgcccgccaccacgcccggctaattttttttgtacttttagtagagacggggtttcaccatgttagccaggatggtcttgatctcctgacctcatgatccacccacctcagcctcccaaagtgctgggattacaggcgtgagccaccgcgcccagcctcctattacttgttctttgagcattatgcctgacccaggcaagatgaaagcagaagggtcaatcatttctcctttaatattaaggtaggattttgcttttgcttctgtccacagagtaactggtaactgactaggcctcccaccataagcagttgcaaaactggataaaatatataaagcaactattttcaggcacgatagacagaaggaaattcggtaggtgaatcccatgattacgccaggattctgctgggaacaatgtcctggccacgatgcaacaagacagagtgtgagcagagcatggctgtcacactgaccggggaggcatggaaagaagttgcaaaaatcctcagtgaaaaaaaagaaagaaattactatctatgtagaaaatctcaaagaatcttcaaaaaagctattagatctaataagtacatttagcaagatcacagggtacaaagtcaacaataattcataattctatatactaacaataactacttggaaattaaattttaaaacacagtactatttaaaatagtgtgaaaaatatgaaatcttttgggtagaaatcttacataatatatacaaattctatatgctgaactaataaaatgctgatggaagaaatagaagacctgaataactggagagatatatttgtttattgatttggaagactcatcagagtaaagatgtcagttctccccaaattgattgaaagatccaacacaattctaattaaactcccaataggatttttttgtagaaatcattaagttgattctaaaatttatacagaatgacaaaggaactagaatagccaaaacaattttgaaaaagaacaaagttggaaaagccacacaacctgataaagttatcatattcaaaatagtataatattatagaaaggatagatctaggccaggtgcggtggctcacgcctgtaatcccagcactttgggaggccgaggcaggcagatcacctgagatcaggagttcgaaaccagcctggacaacacggctgttgagatcacgccactgcactccagactgtgcaacagagtgagactctgtctaaaaaaaaaaaaaaaaagatcactggaacagattggagagttcagaaatagattcacatatatatggcactatctcagctcactgcaacctccgcctcccgggatcaagcaattctcctgtctcagcctcccgagtagctgggactacaggtgcacaccaccatgcccagctactttttgtatttttagtagacacaggttttcaaactcctgacctcagccaatcctcctgcctcagcctcccaaagtgctggaattacaggcatgaaccaccacacctggccaagaagttctttaacaagagacactgctgtgtccttaatgtagatgctgaaaaataaataaataaaaataaaaattaaaaagagattgccgatgttaccatttttatgaaacagcagatgtggaggcttggacactgctttgccccttgtggtgggtttgccgcagcccatttgccctgtagagactgagcagacaagggcagacctctccttgctaaatggctctgtagctgggccaggggactcaaggagagggagaaagagtgaaagactgtacagggaggtggacatttgggcaaattgggggtgggcagacattcgtcaccccttccaagaaatagtagcctgattgttttgacaaagacaagtggagggaaaggagtctctgaatctgtatttaggaagaggaagttcctggacctcattctaaaactgtccccaagtccagacactaacactttggattgaattcagtgcagccaagccacctgcctcttcctatttcccagtctggaagagttaataaattcctattaggtttggtcctgctctagccccagccagatgggggatggccctgagtggacaacatgaaacaggagcaggaggtcatggcagtgacccaagcctgcatggtccctgtccccactggctagacccagtcgtgccgggcactgcctggcagaggagcccagaaccaggtcaggggtgagagccaaggggagccctgggagtgtggaagagagcctgaccttgacatgtgcctggactctgcccagggctgctgaggctgggctgcttgagtcaccaggcttggccgtaagcctgggcattggggtcagggcccaggcggacttccctcctcctgcactccctcctgacctcagagtttgcggaggatcccgaaggagatgcagcctcttgtggctccaagacctggagcaggaagcccaaggagaggatgcagagaaaagaggaggccaagagagagaaggatgggaggtggcagagggggtgaggggacagaaggggaggggtggaggggccaaggagagaggcaagagggggcccaggagctggcagaacagggaggcgagagcagagtgagagacaaaggagagaaaggggcagatgggaccagaaaggcctcaggttcaagaagggggtgagagaacccaagggatgcagaggaagaggccgagcactgctggacgtcttttcgccaaaggggctcatgtcaaagggcggaaggtcttcatgtctgggagctaatgtgagtgcactcctgcttgtgtgagcctgtacatacatgctcctgcccatcctcgtgtcggctgtgtctgtgtttctctgggtgtctgtggctctgaatgtggggctcagggtctctgtggttgtggtcaagggttgcggacacgttcttagcagttattttcttgtctgtttctgtccaagcgtgcttggggttgtgtggggctgtatctgttaggggtcccccactctggctgaggggccctaatggtgggtgcactggacagacagtgatgtccccaccgccactacacacgagcactgccttgggtgaatcagacattgcactgggaatcccgggaccagggtgggtccctgagcggtttgtgtttcagtctcctgggatgaaaatggggacagaatggtcacccctcggcctgtcccctctgcctctctcactcttctctccgtcactgtcaatgtctctgcatctctctccaacattctgctgtctctgtctctgggtctcttgctgtcttgtcctccaggcctttccctctctgcctttacttctttccctctgccggaggatcctcaacccaccccctccaaggccactctcggcctctggtctccccctcccctgcctcccaattcgccctgtccctcggtctagcgacacctctgcgggtcccagatcgcttcctctacgggacctgttgcttctctggggtggatctgcccacgacctcaggtccggggactggccggtgggcgtggtggcgggggtccgcgctcccacctctctccctttccctcttcccgccagagactgagacagacgcgaggccgtgcattggcggaggtttattgtccgtgctgcaggggcgggcgcgaagagcgcgccggtggggcgagcgcggggctcagtaggcgtcgggctgggcgggctcgaagggctcgggcgccccggccagctgcaccagccgcagcagcaaggccccggccggcccgtccagctgcgtggcgttgctccggtcgctggcgcgggcgcggcggtgaaagccctcgcggcactcgggctcggtcacgcagctctctgccgggaggacgtgtgagcacgggcgccctggggcgggcgcagctcggggtgcggggggcccacaccctccctgccgggcccgacgcagcccccaccccgccgcaggcccgcgtcccccccacccaagcggtctgcgccccccccagccccaggcccgcccccgccgcgcaccgtcgttgcagcaaacgccgaaggcggcgcagcggcccccgctcccgcacgccttctggccggactggcagggcgacggcaggtagttctcctcctggcagcgcagcgcctcagccgtgcccacgaagcagcccagctcgtccgcgcagcagatgctgggcccgaagcagcggcctttgcccccggggccgcaggggaggcactgcggggacgggcggggtgagcgggaggaggggagccgggagtcgaggggttggaggggaacgcagcgaggcggggatgctggggtccagggctcggagtgcgggcgggacaccggggctgcggctgcaggcacgctcgggcgccactgggcctcgaccgcggtcacgggcggggcgtccagatctgctcggcaccttggtttcttggatgacctctcggtgacagccctcagcgtcctcaccctcagctagggacgggtctcccgtggactacagcgtggggaacccttcctcgagcctcggggtcatcgctggtgggcgccactgttgcagctgccccaccctccaccactccagacccttcctccttcctcctcgccctgctgcggcttgagcccgggcccacccccttccccactacaccatgcggagaggccctacccatccagaaccccggcccttcccatttcctgtctcctctcttgccttgcccctggcccccgccaagcttgtcggcctcagctggagccctgacccctgctcagccacctatgacctatcaggtgggtggcaggggcctgagacctagaggcgagcacggacacccaggtgcctcaggaccctaaaggagcctagcaggaggaagagaggctgcgggggttgccgagcggccactctcatctgctcaacagccggttctctggcgcaatggatagcgcattagacttttagctgagcctggtgtggtctaatttgctcaagggctcatcattgagcctggacagaattgcatgcacatcgtgattggatttccttcagctctgctggaaatggaggaaacgtccagcactatagaattaggccaggttcccagcagaacttccccacaggatgccccactcaagcgcgctcagaccagtggccatcttctgtgtgggggcctgggcgcctgtggctgggaggctggggctggatgaggaaagcctccaatgctaggtaggatggagcctctgctgccccagccagtccagatgcaagaacgccatgggcacaggggaggccatgatgccccgttctccctatccagccccaagcccagtcaccggggaagcatccctcatttccctgcatccctgtctggatggcgacagtgaccaggagcgccttcagcctctcccagcctcctccaaagcctggtcccctctggcccaccccattggctcctctgcccagccatgccatgcctccctcttcctcccccgaacttcccctaaaggctaccaccacccatgacttccctctttcctagcccctgacccagggtgtcagcactgcccgctatggcagccctgagatggcccacagtgggaagtacctgtctcagctccaggtcggacatggccctcttgccgcccctcgggcagttctggaagtagcacgcggaggagaaggccagtaggccgaggaagcaggcgggcagcatggtgtcaggcatcctggtgcacacaggtggaccccgtatgcagcactgcttggtggctctgtgctgctgcctctgctggctgcctatttatgtccgcaggtgttcccgtggaggcgagacgcggccgccaccccctccccagtggctccccaggagcccacggccgccaggtccccagccgtcagcagtgattcaggcatctggggacacacgtgggcctgtctgtgcaggggatcataggggaggggtacgggccgccaggctgtcatgggccgcggaatgacagcaattgcctctactgtgactgcagcgctctggattcagggagagggacagactggggggtcacctggagaccatctctgagctttctgattacccagaaatggcgtagggtccaagaagagggtaagaggaaccgaggggctgcgtgttaggggcagggacaggccctggcctaggagctgtggggcaggggacagccaggtgtgtggggagggttagccctgtgacaacaagataagggaccaagaacagcacaagcccagagtggtgaggacaggggctgcaccagagatgagaatccctgcctcgtggacaaggcagccgccgtcgtggagtcaagggacacagaatgagaggggcttgttctcacagggtaggggggtggcaggttgctggggaaagtgcaagacatgacacccccgcacccccatagagcagggcatggggactcaggccctgaaactgggggccttggggacacattggcacatgacccgtcaccccctcccaggtagaaacatgagtgtggagagctactatggggagaaagaactccatgccaagtaaggttcaaaggcggggggagccccaggaaacctgacaacagtttgtcccaattcctacccccaccaggaccttagtatgtggcaaccagggcaggtacatctcaggcctggggtgggagagccgggggtggggggtgtctgggcctgggggaaggtgcaggaggagccatacctaaatggacccagcctgagaaagccacttttggtccctaatcccaaggtggcaggtctaaagaggacatggcctctctccctgggccaccagaatgccccgctggtctggggttcaggcccggtaccccctgcctctcaagctgtgcgcagtccccagctctcgcagttcccacaggctcttggcctcctctccagggtgcatagaggtgctgcgaggaaattccaggggacacagcagccccatctccagcaagggcagtgagggggccagcaacccaggaggggcctcctatactcaggccatggcgtcggtcttttcaggaatgacccctcagggactgcaaggaccctttgagaggcaacactgggcagttgttattgcaggaacactggctcccaatagcttggctcagggtctggcctctgttgctcgacacttcatggcttgggcagctcactggacttctctgtgccttactttctgccagtgtgaagtaaggaaaatcatggtacccacctcctagggtcaatgtgaggacagaaataaataatttattatacaaaagctttagagccaggcatggcagcttatgcctgtaatcccagctacttgggagacccagacaggaggttgagaccagtctcggcaacatagcaagaccccatctctattttttttttttttttttgagacagagtctcactctgtcaacccaggctggagtgcagtggcacaatctcggctcagtacaacctccacctcccgggttcaagcgatcctcctgccttagcctcccaagtagctgggattacaggcacgcgtcaccacgccaggttaatttttgtatttttagtagaaatggggtttcaccatattggccagtctggtcttgaactcctggcttcaagtgatccacccgcctcggcctcccaaagtgctgggattacaggcatgagccaccgtgctcggccccatctctaattttaaataaataaataaatactttttttttgagacagagtcccgttctgtcacccagactggagtgcagtggcgtgatctcagctcactgcagcttccaactccggggttcaagtgattctcttgcctcggcctcccaagtagctgggattacaggcgcctaccaccacgcctggctaatttttttgtatttttactaaagatggggttttgccatgttggccaggctggtcttgaacctgaccttgtgatcctcctgccttggcctcccaaagtgctgggattacaagtgtgagccgccgcgcccggcctataaatacattttaaattgaaaaaaaaaaacaacagctttaaggctgggcacggtggctcacacctgtaatcccagcactttgagaggcaaaggcagaaggatcacttgagcccaggagttcgagaccagcctggacaacatagaccttatcactacagataatttaaaaattgggcaggtgtggtggtgcatgcctgtggtcccagctactcgggaggctgaggtggaagaattgcttgagcccaggctgcagtgagccatacctgagccactgcactccagcttgggtgagagtgagacactgtttcaaaagaaaaagtagctttagaaaagtgcctgcatgtggccaggtgcggtggctcatgcctgtaatcccagcactttgggaggccgaggcaggcggatcatgaggtcaggagatctagaccatcctggctaacatggtgaaaccccgtctctactaaaaatccaaaaaaaaaaaaaaattagccgggtgtgatggcgggcgcctgtagtcccagctactcaggaggctgaggcaggagaatggcatggacctgggaggcagagcttgcagtgagccaagatcgcgccactgcactccagcctgggcgacagagcgagactccgtctcaaaaaaaagaaaaagggggctgcagcattgtaaagttaatgaacagtagtattgcattagtaatgccattattctttgttttgttttgtttgagatggagttttgctcttgttgcccaggctggagtgcagtgacgcgatcttggctcactgcaacctctgcctcccaggttcaagcgattcttctgcctcagcctcctgagaagctgggattacaggcgcccatctccacgtccagctaatttttgtatttttagtagagacagggtttcaccatgttggccaggctggtctcaaactcctggcctcaggtgatccaccccactcagcctcccaaagtgctgggattacaggcatgaaccaccatgcctggccaatgccattattcttgttaagagctaggagatttttccagagagagcagcttcctggattagtctaggaggaacattttcattctactcctggcctggaaacaagcttggtctgaggccgttgccccgctgagactctgtgggttgtgaggctagctgaggagagaggctggaggcctggctaaggcgccttggcccagcaccttaccccttcttcactgcagggggttgagtcaacaactgaaaacggatgaggccagactgactgaagggcccaagccatgggacagccaggacctctgtgctgaccagatctgtctaccaggatcttcattctaagaccggcctcccacaccgaggcccctttctcccaggacctaccttctcggaaccttggctgactgggaaaagtctctatcctgtgctgactggctgcatttccaacacatcaccccatatgtcacatggaccccccagacactgcacacccttctacacgtcccttacaggtttcctttcccaatctactttttacatcttctcggtccttttatctcctacatctcagctcatgatcctgattcattcatccttccaaaagaaaggagtcagctccttcaccagttccttccccctcccctgatgtatacccttcatccaccattttctaaatacaatgacgttatgatagatcagtattacaagttagattgcaattctgccctctgagctaagccacgtagtatattatgatgatctttctatctgtgaacaactttttgtattccttggagttagtggtcatcttggtttttcatttgtggtccatctgccctttgtttttgtttttgtttttgtttttgtttttagagatggggtctcactccacctgccatttatccagaagtcaacatttattcttcaactccctccacctgggcttctgctcaaaccagcccattgaaactcctgttgtcaaggtgttaaactacttccatattgaaaaatgtggtcggctgggcgcaatggcttacacctgtaatcccagcactttgggaggccgaggccggtggatcacgaggtcaggtgttcgagaccagcctggccagcatagtaaaacctcgtctctactaaaaatagaaaaattagccgggcgtggtggcacctgcctgtaatcccagctactcgggaggctgaggcaggaaaatcgcctgaacccaggaggcggaggttgcagtgagccaagatcgtgccactgcactccagcctgggcaacagagcaagactccgtctcaaaaaaaaaaaaaaaaaaaaaaaaacgaaaaatgtggtggtgatgtctatgtccttatttcacatgatctagcagcatttgacatgggtgaacacttatccttttctttttttttttttttctgagacggagtcttgctctgtcgcccaggctggagtgcagtggtgtgatctccgctcactgcaagctccgcctcctgggttcatgccattctcctgcctcagcctcccgagtagctgggactacaggtgcccgccaccgcgcccggctaattttttgtatttttagtagagacggggtttcaccgtgttagccaggatggtctcgatctcctgacctcatgatctgcctgcctcggactcccaaagggctgggattataggcgtgagccaccgcgcccggccacacttatccttttctgaaacacactttgtttggttccaccgatgctacactctcttggttttccttctgttacaccgggtgttctctctgtctccgtttctggctccttctctttgaccttgacttctaaacgttggagcatcccaggaatcagtcctgtgtcccttctcttcctgggtgatcccacaattttatatacttactacaagctaataattcccaaactggtatttccatcctgggcctctccccaaagagccagacttatagtttcaactgcccagtgacacctcacattggatatccaataggcttctccaacttaacaaagtcaacacgcaactccagattctcagctgtttccctgctcttccagggttcccacctgtgtgatcttaccaccatccaaccagctgctcctcccagaacctgagactcaccctgggtcttctctttccctcactgttgcttatgttacctctaaaatcagtctcaactccaactgctgctttgggatctgagatcctgctgtttccgtgtcctggaagattcctctacccgcaccctccccaggattcatttgattggtttaaatggcatctcttaagaggaggctcccctgactgccctatctagagcatcccccatctctgttatcttctgtctgggactatgttgatgaatttcatagcacctactgcaattcacaattcattttttgtgtgtctatctttttgtgtgtgtatgcctataacccctttaaaatgaaacaccagggcagaaaggaaggactctacctttcatgctcagtacggtaaccccactccaggtagagggtgttcaataaattatggaaagaaggaagggaagctctgggtaccagcttcagctctccagggagttctgtgtgacccagggcaagtcacacctgttcccaaggttatttacttgaagtactaaccccacttcctgtcccactgaggtcttaagggaatcagatgagggtgccataaagggttaagatttctgcaatccttacataataaaacgtggcaagcctccagatgaaaccccaaatgtcagaatgttctataaagtacttccttacccttagaccaccttttctgagaagaagtaacagttaactaatcttagcagagcatctgccctgcccacaccttctgtttcttattcccctgctgtatataccatagaacatctccactactgccagagagggcatggcctcattttctttctatcttttttcctttttaattttttttttttttttttttttttttgtagagatgagggtctcactgtgttgcccaagctagtctcaaacccctggtcccaagtaatcctcccaccttggcttcccaaagtgctgcaattacaggcgtgagccactgtgcctggccattggcttcatgttctttttcttttcttttctttttttctttttctttttttttttttttttttttgagacagtgtctcgctctgtcgcccaggctggagtgcagtggtgcgatcatggctcactgcaaactctacctcctgggcttaagagtgatcctcccacctcagcctcccgagtggctggaaccacagcaccatgcccagctaatctttgtttttgtgcagacaggatttcaccattttccccaggctggtctcaaactcccgagcccaaatgatgtgcccaccttgacctcccaaagtgccgggattacaggcatgagccaccgtgcctagctggcttcattttcaaaagaacactgctggtagcagtaagtccagctttctctcttttcacctgttggctcactgcaacctccgcctcccgggttcaagcaattctcgtgcctcagcctccctagtagctgggattacagatgctcaccaccatgcctggctaatttttgtattttttgtagaaatgggctttcaccatgttggccaggctggtctcgaactcctgacctcaagtgatccgcctacctctgcctcccaaagtgctgggattaccggtgtgagccacggcgccagcctccagtagtatttttgaggacccacacaaatgctctgtaaactatgaagaggggaacaagagcaaacaaaagatgttgtgggagcccaagacctgcttactgaattgaatcaaagaggatacattgagcagggatgagaaacctctgagaaaaatgctgagcctgaggggacaggtatggaactgaaatggatccactgcaggaccaagtaaaaaagggcgggggaggccttctgctctttccagaccaaggcacatctcagctggattgaagagctaaatagaataaaatcagccgacaagctgggcgcggtggctcatgcctgtaatcccaacactttgggaggccgaggcgggcagatcacgaggtcaggagttcaagaccatcctggccaacatggtgaaaccccgtctctaccaaaaatacaaaaaaaaatgagctgggcatggtggtgcgcgcctgcagtcttagctgcttgggaggctgaggcaggagaatcacttgaacccaggaggcggaggttgcagtaagccaagatcgcgccactgcactccagcctgggcgacagagtgagactccgtctcaaaaaaaaatcagctgacgagggccggggagcggcggggaggggatgcgggaagccaggtctgaatatttatcgtatctctagaggggggttacattaaacttttaaaagaaatcagaaatgaaaagacaataaaaattctttaacttgcaaaaataacctaagtaaaaggcaaaataaacgaagaaaaatatttttgacaaactcgtttctatatggaaaacctgtacggcagcaagacctgtagactcgcatctagagacgctcaaccctagctccgtgttccaagtgacgtggcctgtcgcacccgccggggacaatgactgcggccctggggtcccacagacgttccctttgctagacttaaggaagagctaggcctgtccgcgctcccagcccccacgcagccagacacccgcgggtgctgagatgaagagtgaagtcaccaggagagacaggaaacagcgcgggcctcggggacccgagggcgcggaagctcgggggccggggtcgagcacagattgggaggcgcagcgctgggcgcacgtccccgtcggcccggcggcccctaatgaggcgcgctgtgcgcagactgctaagagcagcatgagcacggctccggcggcccccagggccccgcgggtcggcgccaccccggagcgcggtgcccggaatcacttagcgccatcagccgggcggctgggagggggaagcggccgatccgggcggctgggagggggaagcggccgatccaggcggcagcggagggggctgcagcggaggcggccccggcttgcacgctcgcccttccgcctgcccggcagggccccgtctgagccccaggccccaggcccagcggcgccgctcgccggtgaaggaaaccagcgcagagaggccgcgctgccaggcgcgtggtggtccgggggtccacgtgtgagcctcgccctaggctgccaattgagagttccacctccgcccagagagaccccacctcacccctccaacctggggcgcgcgggccggcggaggggtcctggggcgagtgggcaggataggccgccgcgcggggtgggcttctacggggtgtactcgttgcctgtggctggggactgaaattccccggaaaaggagacggggaggacacacctggagggataaacagcttgtgcagggatgtgaaagagagaacccagctgtgtgtgcgtgtgcgcgcgtgtgtgtggtagggacgtcatacaggacgcgtggcctacgaacgtgctaaaccactggcaataaaaacacagagtgtggggccgggagcggtggctcacgcctgtgatcccagcactttgggaggccaaggcgggtggatcacctgagatcaggagttcaagaccagcctggccaacatggtgaaaccccatctctactaaaaatacaaaaattagccggccgttgtggcaggcgcctgtaatcccagctagtcgggaggttgaggcaggagaatcgcttgagccagggaggcggctgttgcagtgagccgagattgcgccactgcactccagcctgggcaacaagagtgaaactctgtctcaaaaaaaaaaaaaaaaaaaaaaggagtgtgtgccagcatcactgttttaagccttttacgtatattttcctccttgaatcacataaaccctgtgaaggaggaagtatttttatctctatttgcagacaggaaactgaggggcagagaggttgaataacttgcccaagttattcaacgaacaagtgataaacagcagacctgggattcaaactcaggctccagggtctgtgcccttcaccacgctactgccacaaaaccctagcagagccgggtgctggggcacgcgcctggagtcccagctactcctgaggctgaggcaggaggatgcttgagcccaggaggtacaggctgcagtgagccatgatcacgccactgcactcctgcctgggctgccgtgggctatgcctagctggcgtctgcactaagttcagcatcagcatggtgacctcccgggtgcaaggggaccaccaggttgcctaaggaggggtgaaccgactcagatcagaaatggagcaggtgaaaaccctgtgctaatcagtagtgggatcctgcctgtgaatagccactgcactccaggctgggtgacatggtcagaacccatctttgaaggggaaaaaaaaaagattgggcttgggggtgcatgccggtggtcccaactactagcaaggcagaggcaggatgatggcttgagcccaggaaccggaggctgaaatgagctatgatcgtgccactgcacttcagcctgggtgacacagtcagaccctgtcttataaaaaataataataataaaatataaaataaacaaaataaaatagcagtgactaaaccccaaagacatttgtaatttactataattcaagttgggaagtgggtggtcccaggcctggctgaaattcagggatggcatctagggcttccccactcctgtctggtaccctccacatgtctgagtgtccctccttgtggcaaggggacagccacaaaatgggttccctcttctgagcctctccgctctcagggaggagaaacctgcccagagtccccacccctaaatccctccagactggacaagcaccactagccggctgccttctttgggttaggccagccaaagctcacccctaagattaggtgtgctcacaggcccctgacaaaatggggtcctgttggtgaggaagaggagggacgggactggctgctgggtcagtaactggggtatttgtccccggccccaggctggaaggcattggtagacttgtacagatcacttcacttgtggggaccctgtggcacagagagaccccgtggcttgtccgggaccacacagctaagccgggcagaactactgagcgaggagcctatcagtcctggttcccaagctccctgccccagcctgcccctggcctcccagtgccttggcctgcctcacatgcctgggcttggccccaggttatcttcagagccatcccatcctgcctccctgactgaccatgccacttcccgctcaaaacctgtccatggctccccattgccctctggacaatgcccagacatgtccaacaggcctgcaggtctggccctgctaactctcacctttgtccactcccccgagtgacacaccgttgtccccagcccccaagggtacgccaattccaggcagtgctgccgggtcttctctgttggtgccttttatgtgattttttttttttttcttttgagacagggtctcactctgttgctcagactggagtacagtggcgtgatctcagctcatgcaacctctgcctcttgggttcaagcaattctcctgcctcagcctccggaatagctggcattgcaggcatgtgccactactgcccggttaatttttttattttcagtagaaatggggtttcaccaggtcggctaggctggtatcgagctcctgacctcaaatgatccacctgtctcagcctcccaaagtgctgggattacaggcgtgagccactgcacccgactccttttatgtgattgttttaaagaaccaacctctggttgtgttgaatctccatagtgtttgtttcactgatttatacctttattacatttcatcttctttctttctttcttttctttttttttgcgacagagtcttgctgtattgccaaggatggagggcagtggtgtgtttttcagctcactgcagccgctgcctcccaggttcaagcaattctcctgtctcagcctctcaagtagctgggattacaggcacctgccaacgcacccagctaatttttgtatttttagtagagatggccatgttcaccatgttggccaggctggtcttgaactcctgacctcaagtgatccacccacctcagctcctaaagtgctgggattacaggcgtaagtgtgtgtttttttagagataggctctgttgcccaggctggagtgcagtggtgcaatcatagctcactgcagcctcaaacttctgggttcaactgatcctcttgcctcggcctcccaagtagctgggactataggtaccgaccgccacgaccagctgatttttattttttatgtttttgtagagatgggatcttattatgttgctcaggctagtctcgaattcctagcctcaaggaattctccggtgttggcctctggaagtgctggaattacacgtgtaagccaccacgcccggcaaagattttattttttattcaacctgagagctccggttttaacaaggcaaattgaatctgttaacattgatggtggctgcccgtctacttggattcatttgcaaacatttagcttctgttttctttttgttattgtggagacacggtctagctctgtcactcaggctggagtgcagtggcgcggtcatcaaactatcctcctacctcagattcccaagtagctgggactacaagcccaacccaccatgccagctaatttttttttttttttttgagacagacttttctcttgttgcccaggcttgagtgcaatggcacgatctcggctcactgcaacctctgcctcccgggttcaagcgattctcctgcctcagcctcccgagtagctgggattacaggcatgtgccaccacacctggctaattttgtatttttagtagagacagggtttctccatattggtcaggctgaactcctgacgtcaggtgatctacccgcctcagcctccctaagtgctgggattacaggcatgagctaccgtgcctggcccatgccagtttttttttttttttttttttttttttgagacagagtctcgctctgttgcccaggctggagtgcagtggcgcaatcttggctcactgcaacctccgcctcccaggttaaagcaattctcctgcctcagcctcccaagtagctgggactacaggcgcctaccaccacgcctggctaatttttgtagtttcagtaaagacggggtttctccatattggccaagctggtcttgaactcctgaccttgtgatccgcccacctcagcttcccaaagtacatgagccaccgcccccggccaccagctaatttttttttttttttttgagatggagtctcgctctctatcacccaggctggagtgcagtggtgccatcttggctcactgcaagctctgcctcccgggttcatgccattctcctgcctcagcctcctgagtagctgggactacaggcgccggccaccatgcctggctaattttttgtatttttagtagagacagggtttcattgtgttagccaggatggtctcaatcttctgacctcgtgatccgcctgtctcggcctcccaaagtgctgggattataggcgtgagctaccgcgcccagcctgccaccagctaatttttaaaaaaatgttttatagagacatggtctcatatgttgcccaggctggtctcgaacttctggtttcattgcttctgttttccatttactatgacaccctttcacttctttttccttctttcttgtcttaaaatggattatctttaaatcttatttctattatttcagtagtttaagcaatatttaagattaatccatatctttattctcctccaaacaagctgggttccttagaatgttttaaaaaggatttcttgcccagtgcggtggctcacgcctgtaatcccaatactttggcaggccgaggcaggtggatcacttgaggccaggagttcgagaccagcctggccaacatgacgaaaccctgtctctactaaaaatacaaaaactagccgggtgtagtcgtgcgtgcctatagtcccagctactgaggaggctgaggcaggagaatcgcttgaacccaggaggtggaggttgcagtgaatcaagattgccctactgtactccaacctgggtgacagagcaggattctgactccaaaaataataaaataaaatataaaatgaaaaggattcctttactgtaatcatatattttattgtagttaatgttttagtttcaccttgtttttaagacttctcagtactcattgctgttattattaatattgattaaaactccactcacccttcctttgacatccagatagtctgtacctcctgatggaaaaataaaaaaaaaattccccagatcaataactgcatacaaaacccaggggctgtgcagatttactgcagggggaagactatatttggaaccggcctccattaggtgcccccaggctaaatttagcaaaatccttctcattttccaagacctattcatttccctgcactaaagaggaaaactgtataaatagggataatgtagaatagctaatgtttactgtatgctgataatgtgttcttggcatgtacattataagccacataacaatatcatgaaggcatgggctcacacttgtaatcccagcacttagggaggctgacacgggcagatcacctgggttcaggagttcaagaccagcctggccaacatggcgaaaccccatctctactaaaaatataaaaattaggccgggcaccaggactcacgtctgtaatcccagcactttgggaggccgaggcaggcggatcatgaggtcaggagatccagaccatcctggctaacatgctgaaaccccgtctctactgaaagtacaaaaaattagccaggcatggtggcacacacctgtagtctcagctacttgggaggctgaagcaggagaaggaggtgaaggttccagtgagctgagatcgtgccactgtactccagcctaggtgacagagcgagactccatctcaaaaaaaatgaataaataaaaaaattagccagatccctgtagtcccaggtatttgggaggctgagagaggagaattgcttgagcccaggaaacagaggttgcagtgagccaagatcacaccactgcactccagtctgggcaacgggagtgaaaccctgtctcaaaaacaaacaaacaaatatatcacaaaatatgtttagtgtttttgatgggtttttttcttttcttttcttttttgagacagagtttcgatctgttgcccaggctggagtgcaatggcatggtcttggctcactgcaacctctgcctctgtgttcaagcgattctcctgcctcagcctcccaagtagctgggattgcaggcacgcatcaccacaccaggctaatttttgtattttcaatagagatggggttttaccaagttggccaggctggtcttgaactcctgacctcaggtgatctgcccacctcaggctcccaaagtgctgggattacaggtgtgagccactgcgccaggtcttttcttttttcttttttgaggcaggatctggctttgtcacctaggctggagcacagtggggcaatcacagctcactgcagccttgacctccttcctgggctcaagtgatccacctgcctcagcctcccaagtagctgggaacataggtgtgtgccacaacacaagctaattttttttctttttttgagacggagtttcgctcttgttgcccaggctggagtgcaatggcgcgatattggctcactgcaacctccgcctcccaggttcaagtgattctcctgccttagcttcccgagtagctgggattacagggatgcaccaccatgcccggctagtttttttgtactttattagtagagatggtttttctccatgttggtcaagctggtctcaaactcccaacctcaggtgatctgcccacctcggcctcccaaagcgctgggattacagccatggtgcctgacctgagggtcaagtttttaatatttgtgtattagtcattgactaagggggctgcagggagggagtctctcttggtgaagtggctaccactggctgaaggcacgcgtccagaggaaggccagctgcaaaccactgaccccaatgtgcggcatctgagggacggacacgcccaggggtcaagagaacggagcctgggagtggcatccacagggtctgctgtaggcgactccagtgccttcctcttgatccctctgctcaggtgcctactccagggaggggctggctttttggattaggttggatgatgaccatcctcaagtgtctgaataaagctccttcagagtgaatgcaatggagaaagggtagtgccttgagaggatctcaggatgatagtaggaagggaaataaatgctgtaaagctaagcagccctcacccccacaaatccactgagatcttttcttttcttttagagagggtctcactctattgcccaggctggggggcagtggcacaaacacagctcgctgcagccttcacctcctgggctcaagcgatcctcccatctcagcctcctgagtagctgggactacagacgtgtgccaccatgcccagctaattacgttacccaggctggtcttgaactcctgggctcgaacgatcctctcactttggcctcccaaagtgctgggattacaggcatgagctaccacacccggcccactgagatattttctgatatcagaacctgagtttcatctttcctgcccctacccctaaccttagctaaaccaacctcctcctcccgcttcaggtcaatgtggagccctagacatgctttattcacgtgtttccctgtctttctgccctactagagagtggtcctttcggtcactacatcccccggacccgccatggacccaaccctgggtcttgggtaaatgaccagtcgagttggtgtgtcctctgcctgcccaggcccagcagcagtgaagggcacgaattatcagcacaggggcatttgcagtccttcttggctaaggaggatcccggctttgcctcctggtttctccgtccttccctagccccgctgtagcaatcatctaggattttgtggttgtttccgttactgttgctgtgtaacaaaccgctcaacatgcagtggtatcaacccaccgccattttatgatgctcacaggttctgacggtcacagtgaacaccttttatctgttccacaatgtctggggcctccacaggaaggaggggcgggctacaagctgaaatcacctgggccttcttcattcacatgcctgggcacttgggcgggagttgcccaaaggctcagctcagttgcagtgctgttgcctggactgcctgctttcctgtgagttggattcaaccttttttttttttttttttttttttttgagacagggtcttgctggagtgcagtggcaagatctcagctcactgcaaccaccacctcccaggttcaagcaattctcctgcctcggcctactgagtagctggaattaggcacccgccacctcacccagctaatttttgtatttttagtagacttggggtttcaccatgttggataggctggtctcgaactcctgacctcaggtgatccacccatcttggcctcccaaagcgttgggattacaggcgtgagccaccgcgcccagcctggattcactcttgaagccattgaatggcagctcagggcttcgatgaagagtgaatctccagaaaacaagggcagagtgacatggcattttatgttagcctcagaaatcacagaaggtcagtgttgccacgctttataggctgaagcagccacaagcctatccaaggtcaagagaaggaacagagcccacttttggctgggaaagtgggccaaataattggcagccaataatttaaaataatcagtggcatgaagccaggaggaaaggagactaagctttggaacagattttttcaaggtggaaaaatccaaggttgaagagaaaggtggacaagcagctgcagggaagccgtgagggaggcagctaaaagcagccgtctaagcagcactgccgagtcactccacagtgccaaccacacacccagtgccaaccacattctggccacggaagcggtttcactctcagactgagttgcaggggctcgcagctttgcaggtgttgtagacccacctgggccacgcccaagcctgtccctgggtttcttcagtagaggaaacatttagggtttaggccacttcgcatcatttccatcatctcatgattgaaggtcaattcgccgaggctgtcgcatgcagacacgcgtgcctggtatctcattccccctattgctcacacttcactttcccctcctcagtcccagaggccggacctccccagcttgatgtcatcctttgggtggaagggaggaaggcaggtgagaggggctctctctggaggctcctggtttctgagacaggctaattacaggcttcctaattaatgagccatggggttgcatttcatccgctgagtcagagctggtgtctgggccctgggcccaagggaagggtatcaagaatcatgggagggggaggccagcctgtgcctctgtctccccatgctgattccctgtcccctcccttttcaagcccagttctctccagcagtttagaggacattgtaggcctcagcccagctttgctcccaactcccgcctctgcttactgaccttcctgggcctgttccactgtctgcccttcacaccttcccactccaccaggaccacgcaggcctcctttggttaccgactctcacaaggttttccaacacccagtttagtttctctttcaaattggatcttctttggccacgtgtatcccacactgggggctctggagagaggcagtgcacttcggtaggatcctaatacccagagccctgggtcgtagatagggccgttcttgagcccgtctgtgcgtcctcctccccacacccttctctcccaggaactgcacacgacgagtacttttccattcacatttcaaccaggagattcatctatttacatgagactaactccgctgagcctttatgggggaagcatcttttatttttgtgcctagaggtgtaatactgaatttcaaaggctgtgctggagcctggtcatgaggttgttattccataattagactctgttgtgcctctggttctggattgcacagtggatttgaaatcaagtgaagacatttctgtaggtcgtgtaggcaatcagaggggctctttgtggtctgagcctctgtttcatcctaactccaagtggggattaaataagataatacataggcatttagtgcaatgcctaggacattgtttattcaatatataaacttttattaaagcttttgaatgcaaaggtttttaacatgcatggatggccttcaaggtctccataatctccttgataaaatcatgcatgtgtaaagcacttgcttctgggcccataggctggacacagctggcccctccacagagggtgacatggctcctcagccctgcaaagattggctctgggtgcccaggctgcctgctggtggggctggaattcttttcatattttttcaggggatctttggactagaatcctagatgtaggatggctgggtagaagggtacatgcatacgtgactcagccagatattgccacattccccgccaaagattgtaccctttgtattctgagcattagtatatgacagctcctgtttacctgaagtctcacctacagattgtgaccaaacatggagatttttgccaatctgctaagcaagaagtagtttttcatggtcctctttatttcatcatattatgagtgaggctgaacattgtttacatgtttaaaagccatttgtatttctttgtgaatctgttatttttagaagctatatgttatgggtattaaccatttaatacaggttgcaaatatattttccaagcttgtaattttcgtttttacttgctaatgaattttgccatgtaagagggtttttggtttgttttgagacagggtctccctctgtcgcacaggtagagacagggtttcatcatgttgccaggctggtctcaaactcctgacctcaggtgatccgcccaccttggcctcccaaagtgctgggattacagtggctcgatctcggctcactgcaacctctgcttcccaagctcaagtgattctcttgccttggccttctgagtagctgggactacaggcatgcaccaccatgcctggctaatttttgtattttttttagagacagggtctccctgtgttgcccaggctggtctcaaactcctgggctcaaatgattctccctccttggcctcccaaagagttggaagtacaggcgtgagccaccacgcccggctgttttttttgtttgttctattttgtttcttaaggtagtcaaatctatcagtctttttccttactgaatctgaatttttttgtttgtttgttttagatggagttttgctctgtcgcccaggctggagtacagtggtgccatctcggctccctgcaacctctgcctcctgggttcaagtgattctcccacgtcagcctcctgagtagctgggattacaggcacccgccacgacgccggctaatttttgtatttttagtagagacggggtttcaccatgttggccaaggtggtctctaactcctgacctcaggtgatccgcccaccttggccacccaaagtgctgggattacaggcgtgagccaccgcatctggcctggattttgaattaggacagttttcctcactcccaggttgcgaaggagttctctcgttttccatttatctctagttcttccatggtttcattcgcccagtgactgcagcgccacctgtggaaaggtcagttttccaccattcctgccttgcagtacacaaaatttccatgtgtagttgggcctgcctatgggtttttcattctgttctgttcatctgcctgtgtattcgtgggttagttctccccacccacaaaccaaactgttctttttcagagttttcctggctaccttgacttattcttacaaatgagctttatttttatttttttttgagatggagttttgctcttgttgcccaggctggagtgcagtggtgcgatcctggctagtgagatcacttgaacctctgcctcccgggttcaagcgattctcctgcctcagcctcctgagtagctgggattacagacgtgcgccaccacacccggctaattttttgtctttttagtagagacagggtttcaccatgttggccaggtctcaaactctcgacctcaggtgatccacctacctcggcctcccaaagtgctgggattacaggcataaaccaccgtgcccggcctacaaatgagctttacaagaagagtatctaacgacaaaggcaaatgtccatgagatagtgttagaaatagcaggcaacagacccacacactatatacctagaaatatttttttctttacagaaaaacattgaaagggaaaacatcaagatgtttgtgtggtgctcacttgatagccgggttaagggtagcgttatcctattattggtgaaaacccggagggaataaacttgaccctcccaagtcttcctcctttgtcctcaccttagtcctgtgccactctggagatcttgtcacccctcttggcacagacagagccatttcaggcacctctctgcaagggagggagtgcattacagccaggtggagcctgggtgcaccgcttctgcccagcgggggaggaaggcaggtggggttcaagcctgtctgattttgtacaccattgttttgctctcctgcccccatgggggggggggctttcctcctctcccaggtgacagttcataagagggaagggcgacaagctcttattttggcccagcactgtccaggagaactttcggtgatggtggaaatggtctctatctgtgctgtccaatataggacccacctgtgctgatcataactcccaaaacaggatccccatcaccataatcctaaatgttgaaatcctgaaagatcaaaatccctgaagtctgaaatcctaaaaatcacaatctcaaaagtccaaatttaagaagacttaattgtacctaatttcaaatctgtcacttatggtttggggattcaattagacatcagggattttagacttcagggattttgatctttagggatttcaacattcggtgttatggcctttgggactgtgtcttttgggattatggccgaaacccagtagccactaaccccatgtgactatcaagcactttaaatgtaggtggtgtgagtaatgaaccgagtttaaaaattcatttacttttaattaaatagccactgtggctagtggctactctactggacagtgcggttttcactaattcacaacccagccctgccccttccaatccagaactggaaggaaagagcctgcactggcaaacacgctgagcagccaggtgaggtgacagcaggcctagccggggggggccagctctgaagccaggacctgctcaacgaaggcccacaggagtcctgggggagaaatcagcctgaagcagcttcccaccccagtggccatcacaatggcagccagcccagcctcacaatgtcacaataccacaggcaggaggccgggcaggcaaagtggtttcctccagggcaggactctttgtctgcagacctacttacagccaccgagcgtcagaaggcccatctcctggggaatggaaaagtgcccagccgctgggaggcctcaagctggagagctacgggggaagcagggcaggtgtggggctgggagaagctactaagccccacaccccaggtgctctggggcctcgcagcccagctgcagggagatggaacactgtgagcagctgttcttcttcctggccatttggttcatctacttcttttctgatgccaacctctcttccacctactcaggggctggaagggcgactggagagccaagcccctgcgagtgaggacagagaatggccaaaggcagagccacagggtagacctttgcaccttgggaggagagatttggagaatggtgctgcctgggcccctttgcccccaccaaaccgcaggggtaccatggccctgacctgcgttcagagggccgagtcaatgtcacaggaaggggaagagacatgtgcccacagaccctgtggtcatggagggggtggaagatctctggagggcagcagggccacagcaaggctctgaggtcctgagtcttctccgtccgtggacttaaactctgcgtgtttacagctgttctgtgcctgggtccaggctctagtgagaaataaactgccttcagagccaggtgacagcaaaagaaattttattcccattttctaggggacagaaacagagcccagtggtgcctagcatgtttctggcaagggtagtgaaaagaccacttccttttgggggaagtctttcaattaagaaaaacacacgcaactcctgggggtggctccacctgtacccaggacagggcctgccactccaggggctcccaggctggattttccaccagagcagtcttgggggcaggagcctgttagaaatgcagatccccagggacctgcagcggtctgggcagtacctccaacacagctgcttaaggggaggcagtccggccctcatctgggagcgccgtgctgacgctgactgcacgctagggctctcggggttgggtggacagggtttctccgagagatgggctcccagcagccagagcacactgtgggtgtcaagctgctggtgggaagcaggctgttccctgagaccatgacagggtgaaggtgggaatcaccagcccccacactcaccaagaaatgcttttgctacatgctggggcttttttctttttttgagagggagtctcactccgtcgcccaggctggagtacagtggtgagatctcggctcactgcaacctctgcctccccggttcaagcgattctcatgcctcagcctcctgagtagctggcattacaggcacacaccaccatgcccagctaatttttgtatttttagtagagatggggttttgccatgttggccaggctggtctcgaactcttgacctcaagtgatccacccaccttggcctcccaaagtgctgggataataggcatgagccaccatgcccggccatgctggggcttttctaagaacacaagcacaccggagggtaagacaagattctggagaggcacagacccagaaagccaggggcacacaggagcctcgccagcgagggcggcacaggccatccatgcggaccctcaaatctcatgtgaaggctgcatcaaggtcagtgccaagaggaagcagagcaaagcatgtgaccacctctctgaagccatctttgtggacaaatgatgtaggaactcaaaaaaatgcaggcttggctaggcgaagtggctcatgcctgcaatccaagcactttgggaggatcgcttgagcccaggagtttgagaccagtctggacaacatagcaagaccttgtctctacaaaaaataaaaaaattagctgggcatggtggcacatgcctatagttcctgctacctgggaggctgaggtagaaggatcccttaagcccaggagttcgaggctgcaatgagttatgattgcaccactgccctcaagcttgggcaacagagaccaaccctgtctcaattaaaaaaaaaaaaaaaaaagcaactaaccccaaacccagatctctaaagtattgggtgtggactagagctctggacggcctaaaggaaaggaatgtgccggttcacagggacccgcggctaagctcaagggtaaaatacagctttacaaagcatctttaggctgttccttcccaaacgtgcttagaagggaacagggaaaggcgggtgtgttttctcactgaggttcttctagtggctggaatctgatagagtaccaagttgtagggatatggatatattttccctttggcactccataaagctaaatgttgggctgaaaaaaggatgcagcctataaacaagtatttttcctgaaaccaactgcatgaggaaacgctgcgctccccctcagggagcagtttctgaagccagctgagcacagctggcactggccagagggagccctccaccctcccaccacgtatgcccacctgcaaacctgggttctgagtccccatgcaggggacagacctgaaaattccagtttgtgtcctttcaggtcatcgacaggaatgacagcctggcaagctgcagtgactgcacacagctaccctgtgagctccacttgtgtgggtgcaggtgggcgacaggagtgtgtgacacagacaggcactccaccaggaggaaacccacagcagacgtcaaccatcgctttattaaggctgcgagtcggggggctgagtcatgcactccacagacacccccactgctcccaaggtccacttttggatgaccctgaaggcagagactcctgagatctgggccacaatctagggtgagccacccacagtgccctgctggacaggggggtatgcggactgcacgggggggccctcagcaggggtcttcctgcctagggtggggctggctccagtgggtcctgggctcaggcagggggggtggcagggaggcagggacatccccccgccctctggcctatggctttgttgccctattgccaccagcgcagaagcaatgtgctataccgtgaggtgatgaagaagagccccgggagggagcaggcagctctgtgcctggggcctggccagacctcaggggtgctgtggccctgctcctgttccccctcagctcctcccagcaatgggtctcctccagtggaggtcagtcactcagaagtggacccgcagcacgtcttggctagcaaccggccgctggcaggctgtgcacgtcatgggcagggagcgttgcttctcacccaggcagggtcggcacaggaggtggccgcagggcagctggtacaccggctcctttttgaagtagggagaaaatactcttttgcaggaggcacattcggggcccaggatgctcccaggctgctctggtaaatcaggaaggaaaacaggccagggttaggaaagctgctccatggtccaggctgctctgaggggcagagccttcccaccgtgctgctgcagcatctggcttcatccctcccgagtccatcccagtctgatcaggtaggggagtggaagcgggagagggagcctgggaacccgggaggcctcttctctatcatctttgaccaaatctcagtgcctctacgaatgcttgagaagagctggcttctgagggcagcaggcaggactgggcccttcctcctggtctcccagcaaggtttactttcccctgcgataggtggccaaggctggagcaaggcacagctcactctgacaagataaactgcaagaaatgtgagaggcgacaagagaaggaaaaggcaggtcagtggggtggctcaagcctgtaatcccagcattttgggaggttgagacaggaggatcacttgaagccaggagttcgagaccagcctgggcaacatagtgagatactgtctctacaaaaaagaaaaaaaaaaaaaaaggaaaagcagcacatggtccagtgcaccaaggttggggaagtgtgagaagggaggtcagcagagacaaggctgaggcctgcagtgcacctgccactggggcctagctcctgctcccttcagccctgcagcctgcagccccctcactgctactggcagccctgctcctgactcctcagtccccctcctgtgctgccctggccctctcggcaggctctcccttcttccgcaactccttcagggcatccttgaatgagggtcacagtgagcagctctggccatgccccaccaggctgcacccacggctcttcctttcctcatggcccctctggagagtgacaggggatgggcttgcctgtcctccttgtggtccatgtctccattcctagccactactctctggaggaccccaaaggaacctcaaaccaatttgcttcagaattgtttcttaaccccccttctctctgtccatttcatcaccataatccaggccgctcgacacatctcttcctaactattcacctgctccaggcttgtcttctcaatctgtcctcaaagctgcctccaatgacccacctatgtaacttgaccaccccataactctgctttctacctcttaggagcttcccaactttcgggacagtcaagactccctgcacggcccacccagcctcctcacctctcttcacaccagtctcaacttttagagtccagcagcttccaatcacttctttgcacactctgcgctgctggcctcctcactttgtgcttgctgttccctctgcctagaatgcccttatctggagacctggcttagaccacacccattccatgacgccaccccggattgcccctttcctgtgctttcagagcccaccagcccttctcagcctccaaggtaggatgcctacttcctccccaggctttgcaggtcctgagggtcaggactatgtccatgtttctcatccggcctcaggacctggcgcagcacctcacagggcaagtgctccatccacatgtgatgaatggacctgccatctacactcgggcaccaggcaccaaagaagggagggcaggggtgccctacacggggagcaggaactgaagtgttcctgcctccgcatccctgagaactgtagccaggaaagagtggcctggctgcgggtgttttctttgggccaaacattaagcaacataaaagtaccgggtgcctctcctgtgcacacaagccaaaaattccccagtgagtggaaagttgaacctctacagggaagggaaggagggaggaatgaaggtggggagggaggggggaaagaagggaggggaggaagcaggaggaaagagccactgactgcttttcagtggtgcccctttcatgcaggctctgccagaggcttcagagatctgcctgacccacagtgcatgatgagaatttattttccatcagttttaaaaagcacacctggcacaacaccacagaagcatgcaagggccccaattgcccccagcactgaccagaagtcccattaaaagatctcagaggcccagagccccaggggcagtttcagtgacagaaaaaaaaaaaaaaaaatcatcaaggaaaagacaattattgtgccctgggcaggatggaaacccaagtatataactgcaaactgaggtgacagagaggataaaaaagagggcttgctttgaaaagggtgggctaacatggcctcctgtaggaagagctgtgagaataaaaaggggccagccacacagaatgaaaggagagcaagcacaaagaacagcctatccgttaaagaaaaagacacagtggtcgggcacggtggctcacacctgtaatcccagtgtaatcccagcactctgggaggccgaggtgggtggatcacctgaggtcaggagttcgagaccagcctgaccaacatagcgaaaccccgtttctaactaaaaatacaaaaattagccgggcgtggtggcgggcgcctgtagccccagctactcagaaggctgagacaggaggattgcttgaaccagggagaaagaggttgcagtgagccaggattgtgccactgcactccagcctgggcgacagagcgagactccatctcaaaaagaaaagaaaaagacacagtgaagctgggtgcagaggctcacacctgtaatcccagcactttgggaagctgaggcaggtagatcacctgaggtcaggagttcgagaccagcctggccaacatggcgaaacgctgtctctactaaatatacaaaaaaaaaaaaaaaaaattagctgggcttggtggcgtttgcctgtaatcccagctactagtgggggctgagacaggaagattgcttgaacccaggaagtggaggttgcagtgagccgagattgcgccattgtactctagcccgggcaacagagcgaaacagagcaagactctgtctcaaaaaaaaaaaaaaaaaaaagacacagtgagagtgggcttcagataagactgcagaggaggagacatgggggctccagcaggcaggacctcagagggagtaggagttgaggttttatcctaagttcaggggatgccatggtaggatttgaagaagtggagcatggtgatgggctgacatgataaaaagatccaactgctatgagtatgatgagccacagtaaggcgaggatggggggataccagcaggggctactgcaggagtctgggagtgaggcagtgggagctgcagccaggggaggggccacagaaggagagcaggggactaacctgaggtcaccttgggggaggatggacaggacctgataatgaacagaatgtcaggatggggacactgaaggaactcgagaatgacttctgtgttagaagcctcaccacaagacagaagatgctgcccttacccaggtaggatgatgggggcagtgagggggaaaagctctggagggcagatgtgagcagtacagagtctgaatgtttcctttagagaggatgctgagcctggccatgatggctcatgcctgtattcccagcactttgggaggccgaggcagatggatcacctgaggtcaggagttcaaaaccagcctggccaacatggtgaaaccccatctctactaaaaatacaaaaattagctgggcgtggtggcgggtgcctgtaatcccagctacttgggaggctgaggcaggagaatcacttgaacctaggaggcggaagttgcagtgagctgaaatcgcgccatcgcactccagctagggcaacaggggcaagactccatcttaaaaaaagaaaaaagagagaggatgttgagtgctgtcagggcggcaggatgagttccaaggagaagcaggagctacaggggaacatggacagttgccggagatgtgagttttcacttgggtaacagagaatattgagattagagagtccagggccagagctggtagagaaggcaattggcaatggaaactgaagagggaccaccgaagataggagaaaagaagcaaaacagcctaaaagccaagagagaaggcgtttcgcacagcaggagctccatctcgtaaaaaatgcctcccgttgcaatcagtttctgttgctttgtatcctaatagattctggcatacaatgggggtcaaggttcattttaggcaaaattggcccataagctgccactgctctttctaagacactgacggaagtgttaatctgaagggatgaggacgacaaacccaaccaaacctctcttcacatttacataaagtgccccggatgtcagactgcagactggctagatgagaaaaaaataacaaaaaaggccaggcgcggtggctcactcctgtaatctcagcgctttgcgaggccgaggcgggcggatcacgaggtcgggagttcgagaccagcctggcaacatggtgaaaccccgtctctactaaaaatacaaaaaattagccgggcatggtggcgggcgcctgtaatcccagctactcaggaggctgaggcaggagaatagcttgaatccaggaggcggaggttgcagtgagctgagactgtgccactgcactccagcctgggcaacagggcgagatgcagtctcaaataaataaataaataacaaacaaaaaaaagagaaacaaaaatcctcaggagaaaataattaacattagatctcacaaggaaacacatcagagggtggccaagccctacatccacagaattactaaggattgactaaagaaagcctttcttgtggggagtttaagttcataggcagcccctcaactacccctggaaaaggcaagagaacaggttctctcccagggtgggtgttggaactgacggggaggctggccaggcaggtccacagagcccccagggactcggcccagcatccagagacagaaaacagaccacccattccaaggctccaaggagatggcggggcccatgttacccgagccggtgccaggcctccaggaagtgttgctccctcttgtgccaaggtgctggagctgtcccctggtcagccgtgccgtgaaggagggcatagagccaagggtggatgccaaggcaatttccaagctttgtgacagcttctgctcgtgggacagtggacctgtcgagagatgcgcacagcacaacatccagagacaggctccgcaaaagagaacagcctcaagtccttcgagggctgtaaaaacggcacctccaatctcacacatcaatgtaatgaaactccatcctaatgtctactggcggaccatgacagaacaccgggaggtaaagccctaggaacaccggcagttcctgcccatcccaccggcttcaggcttttctcctcctggagaaactgctgggcagacatgagccacctcgtggctcaactgcagaactgcacgctcctttttttttttttttttttttttgagatggagccttggtctgtcgcccaggctgagaaggagtgcaggggtgccatctcagctcactgcaaccttcgcctcctggattcaagcgattctcctgtctcagcctcccaagtagctgggactacaggtgtgcgccaccacgcctggctaattttttgtattttagtagagacggggtttcaccatgttggctaggagatctcctgacctcgtgatccacctgcctcagcctcccaaagtgccgggattacaggcgtgagccacagcgcctggcctcctttctaaaggcctccttgctggccaagaaaataactggggcaagcaaacgccagctttggactgctgctccctgccccccattccctccccagcggccttagtcttctctttccctaactccacccttctggggaccccaccaccccccagaggggttcatctgcattttctaggtgttcatgtcctctctctcctgttaagtaaaacaaagcagtttttaccgaatagaactaagaccccacgttgaccacgccacaatttaggggacctttagtgtaggatcaacagaaagccaagccatggaatgagggtgaaggccaaaggggtagggggacagctgcccaagaaagaccccagggacctgtgtggcagaaaaatttgcaatgctgtctcaaagaggagaatggaaacttttgtccactgtttgcaggacacaggacatcagctcagggccttgaaggagccctagtcagcgtggtcctgagtcaccaagtctgtcaaggccaacaggactgagacctccacaaactgacgctgaagtctaaggacctttttccttgttccaccccactgcgcctcagatgtttccaggagtttctgaaggtcatgttaactagaatttactcttaaaaccaaagacacagaaataaacgttaagcatagtatttgcatagtcttttagaagaacataggaaactaaaagaatgatcaacctaaacagaataatttccataaggaaaaagaaaaggttgccaggccaggcacagtggctcacacctgtaatcccagcactttgggaggctgagacaggcagatcgcctgaagtcaggagttcaagaccagcctggtcaacatggcgaaatcctgtctctactgaaaatacaaaaattagccaggcgtagtagtgcgtgcctgtaatcccagctactcgggaagctgaggcaggagattcgcttgaactcaggaggcagaggttgcagtgagccataatcacactactgcactccagcctgggtgacagagcgagactccatctcaaaaaaaaaaaggaaacgtgtcaaagagctaccctccacaagcaccaagcactgacaatcacaaggacttctactagacaggcagagtgggtattccaatactattcaattgttccacagcacagaaaagaaaaaattctaaattctttctatggaacaaaaaaatcatcaatgacacctgaccaaagatggcacacacacacacacacacacacacacacacacacacacactacagtccaaccccactaatgaatacaaaaatcctaacactagcaaacagaaccattaaaatctattaacaggggccaggcgctgtagctcatgcctgtaatcccagagttttgggaggccaaggcgggtggattgcctgagctcaggagtttgtgaccagcctgggcaacatggtgaaacaccgtctctaataaaatacgaaaaattagccgggtgtggcggcatgtgcctgtagtcccagctactcaggaggcagaagcaggagaattgctagaatccaggaggcagaggttgcagtgagccaagatcgcacaagtgcactccagcccgggcgacagagcgagactccgtcactatatagataaataaataaataacagggctgggcgtggtggctcacacttgtaatcccagcactttgggaggctgaggcaggcagatcacctgaggtcaggagttcaagaccagcctggccaacatggcgaaaccccatctctactacaaatacaaaaattagccaggcatggtggcgagcgcctgtaatctcagctaatcaggaggctgaggcaggaaaatcacttgaatccgggaggcggaggttgcagtgagcagagattgcgacactgcactccagccagggcgacagaatgagactctgtctcaaaaaataaaaataaaaataaaaaaaattagccagtatggtgctgtgcgcctgtagtcttggctaccgaggcaggagaatcacttaaatcccagcagcagaggtcgcagtgagcagagattgcgtcactgctgcactccagcctgggcgacagagggagactgtttccaaaaaaacaaaacaaaaagaaaccattaacaggccgggcactatcgctcatgcctgtaatcccagcactttgggaggctgaggcaggtagataacctgaggtcaggagttcaagatcagcttggccaacatgacaaaacccagtctatactaaaaatacaaaaattagctgggcacggttgtgggcacctgtaatcccaactactctggaggctgaggcaggagaattgcttagaccaggaggcagaggttgcagtgagccaagattgtgctattgcactccagcctgggtgacagagtgagactctgcctcataaaaatacaaaaatcagccaggtgtagtggctcacacctgtaatcccagcactttgggaggccgaggtgggtggatcatgaggtcaggagatcaagaccatcctggctaacacagtgaaaccccgtctctactaaaagtattaaaaaaattagccaggtgtgctggcgggcgcctgtagtcccagctactcaggaggctgaggcaggagaatggcgtgaaccagggaggcggagctggcagtgagccaagatcgcgccactgcactccagcctgggcgacagagcgagactccgtctcaaaaaaaaagaaaaaaaatcagccaggcgtgttggcacgcacctatagtcccagctattccagaggctgaggcatgagaattgcttgaacccgggaggcagagattgaagtgagccgagatcacaccactgcactctaccctgagtgacacagtgagactccatctcaaaaaaaaaggaaggaaggaaggaattatttaggttgaattacacagaagtttgtcactgatctgtgttctcgaactaagaaatatgaagatggaggctaagaaatcatttctcttaatattataaataagcaattaacaaataccttgggaaaaataagaatacaatagaagtgaggagtgtgactttcaagattacattctaaaagatggatttccctcgtctgtgcactctctctggaacgcacagctcccacacagtacactgccctatggagaggcccacaaggcaaggaaccgagggcagccttgggccaacagccaaccagcaagtgaggcctcagtccaacaatgcatcaacgagctgaatcttgcaacaatgatgtgggtgagactagaagtaaatgcttccccagttgatccttgagatgaccacagcctcagccaccagtttgatggcagacttggaagaccctgaagcagagaatccagccaagttacgctgggatttgtgatccacagaagttatgagacaatgaatgtttgttgctgtaagccagtaagttttggggtaatttgttacctagcaatagataaccaatacttctttaacatgataaaaacatctatctcaggccaggcgcggtggcttatacctgtaatcctagcactctgggaggctgaggtgggcgaatcacctgaggtcaggagttcgagaccaacctggccaacatggtgaaaacctgtctttactaaaaatacaaaaaattagccggtgtggtggtacatgcctgtaatcccagctacttgggaggctgaggcaggagaattgcttgaagctgcgaggcggaggctgcagtgagacgagattgcgccattgcactccagcctgggtaacagagtgaggctccatctcaacaacaacaaaaaaacatctatctcagcctaagatccaacatccagcttgccctgaggtattcacactgaacacattcagctgcagaggtcacccagtgaaccagggctgctcacctcaggagagagcagcatcaccggccctagaaatcactggcaatgccccagggaagaggcaggaagccaggatccttaaatctcatactcaagaatgttgcaggccaggcacagtggcttgcagatcccagcactttaggaagccgaggcaggtggatcacgaggttaacaggttgagaccatcccgggcaccatggtgaaaccccttctctactaaaaatacaaaaattagctgggcgtggtggcgcgcgtctgtaatcccagctactccagaggctgaggcaggagaatcacttgaacctgggaggcggaggttgcagtgagccaatatcacgccactgcactccagcctggtgacagagcgagactccatctcaaaaaaaaaaaaaaaaacagaagtcgagtgcagtggcttacatctgtaatcccggcactttgggaggccaaggtgggtggatcacaaggtcaggagattgagaccatcctagctaacaaggtgaaaccccgtctttactaaaaatacaaaaacttagccaggcgtggtggcgggcgcctaatcccagctactcgggaggctgaggcaggagaatggtgtgaacccggaaggcagagcttgcagtgagccgagatcatgccaccgcactccagcctgggcgacacagcgagactccatctcaaaaaaaaaaaaaaaagattgttgcaattttacctggtggatcctgccaaatgcaataaagaagaaaaacagaaaaaaacacaaagagaatattgcaatttgtccacacatttactgagtgcaccctcttcagtgtggcttttctcttcagtaaccctctcctgaaaggaaggcccacagacctagtcctttttccttttctgtgtcctcatgccacatggtgaggggggcgcacagagaacctccatgcaatatatccttgtacctctgtgacggttagaaataacacccagaggagcccactgtcacatgagtaacacaaagaaggcaccagaagagattctctgctttgagggactggtatctttcctcccagcagctctgaccagaggcttcaagcccaggaaaaagtgttgaccaggccagggcacataaagggaccccaaggaaggcaacagtgcccatgggaccatcaccaacagaggagcgaaacacgcagactgaagcctcggaacagatgagaatagacgagaacacatggaacccctccaaggctccaggttgtccctggtctgaagacaaagctgaggggccccaggatgggaaacgggaaggaggcagcacaggcacagcctcgggaatgtaagctggccaagcacaaagcaaagggcagcagagctgagagctcctgggaaggagatggatgagcctggctgcggacacaggatgctgaattacctgtcgagcagtccatatgtgtcaggctgggctcattggtggctttcattttcttagcagtgtgctctgaggtagtgggtaagaccaaagggcttgtggcagaaaaacaggaagcatttacaccaaagttactgtctgggacatgttcagcctgctctatcttccttttctgagagggcagaacaatggaagaagggatcactgccaatgccgtctgtgctctcccaagcaggtggcagccagggatggagtgctggagcaggaaatggtcaatccgggccttgagggaggggtgaggcaggggctgagagtgcggagtaaaagctacccccgtgaaagggtcactgggcactcggccccatgtggcttcactgcggttacacttctccagtgtgctctggtcgatgaccttgcctgagggcagcagcatgggacaaggcatgatctccagggtgatgggatccaggaactcctcaggcacatcctgaatgatctcggccagcttctgcaggctggagggagcctgctggctctcaggctggtccccagggtcacagtcactttccatgggcaaggctggagcctgcagagccacatcctgaggcaggttctctgaggtgaccagcaggatgctgtctatcacttcctgggagcaggtcttggccggctgaccccacacttccaaccgcttgatacaagggataccgccgcctgtcacatgggtgatacagatccttaagtgggccacgtggctaagggaaagagcccctttattccagagctcctgggccacaacagcaggggaggggagtgtggcttccatcgcgccaaaagggggcctggccttgaagcccctgtggctaaacaccacttggctctggtttttcagtaagactttgcctaccaaggtgaacgcctccttgtctgggacagatggctcagctgggcccagggtccggcactggggcgtattccaagacactctgctagatgaggcagatgtgtacatttccaggccagtgacgttctgacctcccccagctgtgaggtctatgttgatcctacagatttccacattaaagggaaatgaaactgtcacatagactggtggcttaatgaaatactctgtcctgaaaccatgacttctctttgtgagatcttcagagatgagattttctacttcgtaaccatcagctgatatctagatttaataaaaaacacaagatacaatgatccaaatgaagacaacttgtcacttgtaagaaaactcttaagcctgaggttcctcgttttaaaatttcctctattaaactgaattgtcccagatcagggcacccaagatcagatcaaaggccaagggcaattgtcccagatcggggcccccaagtattgcccaaccttaaaaatatgagcaactgagctgggcatgttggtacacacctgtagtcccagctactcaggaggctgaggcaggaggatcccattagcccaggagttagataggcctgggcaacatagcaagaccccatatcccttttccctgccaaaaaaaaaagcaagcaacaaaatcctgcccaatccaaccaaaactcccttcaaaacagtatctggggagagaagtgcaggggagagaaagtatttctacctttgctatgactttgacgagactggagattgatcatcaaagaacaaagagcacagtgaagaggaccctgcacaaaatgagtcacagctcacctcaccatggcgctgtgtgattctagaggtgagcctgccccatgcttacctaaataccatctgatggaatctaaagtaacaagagcaaaagtgcagtaagcctgaatcaaatccacacacacaaggcaggaaatgatgaaacacatgacaaacatagcatatatttatgtgtatatatttgttttgtttaccttgttgcagtgaattcttggtctgaactgtgggaggcaaagatttattaccatctttgtggctgagaggatatcttccaagcatcagaagcagccttaaataagaaataaaactatgtattagaaaatgtaaaattcaattctaaactttcagaagttgattcttaagagaatcaaacaggatggcaacaaaaacttgaacacacacactctcacggtccacactgactttccttatatcctatacatgatgttggggaaaaattagtcactgaaaaattatagagaagacttctatggcaggctcaacaggttggcaaagactgccagttctctggccaacagctgttccaaagacccaatggaggcaaggcccatcagctgtgctgggggttgccacaggaagggagtggcaaaagtatctgagctcagagaaaggacagagtgttcggaatggaaagggtcataaaaaataattatagtggtggtaagcatccttgtcatttaatacttgtcaatgcaattatgttttcttattaaaatgaaaacaatgagtcaaaaacatcattattgagacatagaaaatttattagaggccaggtgtggtggctcatgcctgtaatcccaacaatttgggaggctgaggtggtaggactgcttgagcccagaagttcaagaccagcctgggaaacatagctggtcttgttgtagagaccccatctctacaacaaaacgttgtagggatcttgctatgtctgatatgcacctgtagtcacaactatttgggaggctgaggtggatcacttgagctcaggagttcaaggctgcagtgagctatgatcacaccactgcattccagcctaggtgacagagtgagaccctgtctcaaaggaaaaaagaaaagcctctcccctctcccctctcccctttcttcggtctccctctgttgccgaggctggactgtactgccgtgatctcagctcgctgcaacctccctgcctcgggctcccgtgattctcctgcctcggcctgccgagtgcctgccttgagtgatctgcccgccttggcctcccgaggtgctgggattgcagacggagtctcgttcactcaatgctcaatgttgcccaggctggagtgcagtggcgtgatctcggctcgctacaacctccacctcccagccgcctgccttgacctcccaaagtgctaagattacagcctctgcccggccgccaccccatctaggaagtgaggagcctctctgcctggccacccattgtctgggatgtgaggagagcctctgcccagctgccccatctgggatgtgaggagcacctctgcccggccgccctgtctgggaggtgaggagtgcctctgcccggccgccaccctgtctgggatgtgaggagcgtctctgcccggccgccctgtctgggaggtgaggagcgcctctgcccagccgccaccccgtctgggatgtgaggagcgtctctgcctggctgccccatctaggaagtgaggagcgcctctgcctggctgccccttctgagaagtgaggagcgcctctgcccagccgccccgtctgggaggtgaggagtgcctctgcctggccacccatcatctgggaagcgaggagcgctgctgcccggccaccccgtctgggaactgaggagcgcctctgcccggccgccccgtctgagaagtgaggagcacctctgcctggcagccaccccatctggtaagtgaggagcatctctgcctggccgccccatctgggaagtggggagtgcctctgcccggccgccccgtctggaggtgaggagcgcctctgcctggcagccaccccatctgggaagtgaggagcgccactgcccggctgcaccatctgagaagtgaggagtgcctctgcctggcagccaccccatctgggaagtgaggagtgcctctgcccggctgccccgtctgggaggtgaggagcgcctctgcccagccgcccatcatctgggaagtgaggagcgcctctgcccggctgccccgtctgggaggtgaggagcgcctctgcccagctgccccgtctgggaggtgaggagcgcctctgcccggccgcccatcatctgggaagtgaggagcgcctctgcccggccgccccgtctgagaagtgaggagtacctctgcccggccgcccatcatctgagaagtgaggagtgcctctgcccggccacccatcgtctgggaggtgaggagcacctctgcccggccgcccatcgtctgggaggtgaggagcgcctctgcccggccgcccatcgtctgggaggtgaggagtgcctctgcccggccaccccgtctgagaagtgaggagcgcctctgcccggcagccgccccgtctgggaagtgaggagtgcctctgcctggccgcccatcatctgggaggtgaggagcgcctctgcccggccaccccgtctgggaggtgaggagcgcctctgcccagccgccaccccgtctgggaagtgaggagcgcctctgcccggctgccccgtttgggatgtgaggagcgcctctgcctggccgccaccccgtctgggaagtgaggagcgcctctgcccagccgccccgtctgggaagtgaggagtgcctctgcctggccgctgtgcaatcttccaagtgtgaagtgacagcctttctgcaggtgtacccaatagctccgaagagacagcgaacatcaagaacgggccatgatgacaatggcggttttgtcgaaaagaaaagggaaatgtggggaaaagaaagagagatcagattgttactgtgtctgtgtagaaagtagacataggagactccattttgttctgtactaagaaaaattcttctgccttgggatgctgttaatctataaccttacccccaaccccgtgctctctgaatcatgtgctgtgtcaactcagggttaaatggattaagggcggtgcaagatgtgctttgtcaaacagatgcttgaaggcagcatgctcgttaagagtcatcaccactccctaatctcaagtacccagggacacaaacactgcggaaggccgcagggacctctgcctaggaaaaccaaagacctttgttcacgtgtttatctgctgaccttctctccactattatcctatgaccctgccacatccccctctccgagaaacacccaagaatgatcaataaatactaaaaaaaaaaaaagaaaagaaaaagaaaaaaaaaagaaaggaaggacagaaggaagtaagttgggcagggacagaaagaaagaaaaagacagagaaagagagggagggagggagtgaaggaggaagggagggagggagagaagacagagaaggagggaagagagagagggagggagggaagaaaggaaggaaaagaaagaaagaaaatattagggttggaaagcaccttaaaatgacatctaggcctggcacggtggctcatacctgtaatcccagcactttgggagacagaggcaggcagatcacctgaggtcaggagttcaagagcagcctggccaacatggtgaaactccatctctactaaaaatacaaaaagcagttgggcatggtggcaggcacctgtaatcccagctactcgggaggccaaggcaggagaatcacttgaacccgggaggtggagtttgcagtgagccgagattgcgctactgcactccagcctgggcgacaagagcaaaactccgtctcaaaaaaaaaaaaaaaaaaaaaaaaaaggacatctaatgcaagtagtcattttaatggccaattccaatggcttctggtaactctgtggagaaggagggaagccactgaaaacacccctcgcagtggcagacctctccagtggaactcaactccttggtgaggccagccagccatttatgcttttctccctgacagtcgtggccatgtaaaattgttagcccgacagggatagggtcaccctctgggccccttttgctgtcaaaatcagtaggagccacttgcaggagccaggcatactaagcgtcctgcaacatctgagtggatagttgctgcacagtgaagatctgtcatgggccttgtaaatgtctattatctcagcttagcccctaactcagttttacatattaacacaaagtatttttaaacatggttttcatatatgctaaattttctaggaggggaacttccatgtaagccagaggaaggtcatatattgttttgttcagacctttaccaagagatgcccaccatttctgaaaatcacatcaccgagagcaaagctctccacctcggtcagtctgcatttgtagcagtctgcattccacatgcgctcctgcgtgatggtaaaagcttctgaatacttctttatgccttctagtatggtcacacccaaacatttatacacgagaataaattttattatcatacctaaaattttttcctttaaagtactgttagggcattctgtgtgttggtggggggagggtgtgtatgtgtgtgtggacctacacacattagcgtgtgtacataagtaggttatactatttggctttaagttcatcatgatagaagaaacatgaatctcatggggtagaaagcccctggcctaaagcctcctgttctttgtgagcctgtgttgaaactcctagtgcttcccactttgaggcacatacacctttgctttgccagagaattttagaatctggcctggcatccacatggactaaagtttctacaattccttttctgaaagattatattaacaatgtctccaggcttctgatacctttcgtgttctccacgataagtaaaaacaaatgaagtatctgatgcattgtgtctacaaatatcctcagaagccctatagttacctctttttggccaggacaccagaactcatttagagcagcatttcccccagcttccctgcccaactagcatagtagcttcctgtcggtttgttttaaatgtaaaattaagccattcactttaattgaatatagaaccattaaaataaatatatagccaagccaatgaaataaaacattcctccttggaaaagcaagcctaggatgccaaaggaaagcagacaatatgctactgacatagatgatgacactagagacagacatatgcagaacggtgctggccccaggcagatggctgaggttggggccctgggacttgagagggttttcttttcactgctccaggcagttccctcttcccctcttggccctgacagaaagccaagaaaaaacaaagccgggcggagtggctcacacctataatccgaacactttaggaggttaaggtgagaggatcacttgagcccaggagttcgagatcagcccgggcaacacagcaagaccccgtctctacaaaaaaataaaaagattagttaggtgtggtagcacacacctctagtcccagctacttgggaggcggaggcaagaggatcacttgaagccaggagtgcaaggttacagtgagctatgactgtgctattgtactccagcctgagtgacagtgagaccctgtctcaaaaaataaagtaaaataaaataagagttcttctagacttaaatgtggttattatgctctatgatatagaaatgtggaaaccttgactgccctttccaatatgtgttagatcagacctgaaattaaggaaaatcttggtatacccttagctacttcttcccacctctgtgtggaagcgagtcagccttctgttcaagcatctcagctcatgaggcttctccacccgcgtcaggggctgtcaactaccccagtcaactacaaaagcatatggacctaaccctgaccagacacagactacctgctctccacagcactcatcaaaatataagttgagggaacatttacagaagagtgttcagtccagccccgttacatgctccttggtgctggtccaagtagcttctcttgcctcttgtctggcactcctcgtggctgctgcagatcttatcccacaccactatctgacagatttcttagcagttttgatcctcaccagttgcaaaaataaatgtaacacattgataaaaattcagtggccgacttgtgacgattcataggacaccagagtagcaggacatatcaggtgataaccataattttaatctctaaaatataccactccattgagctgaccctcagaccagtgcaccggcctatcctcatgttcatcccagccacaaccatcaccaccctcaccaccccctgcaaatactcttcaccaagctactcattggcactgtgtgacaaggaacttcaataagaaacagctctttaaagtcagttactgttttgtttagtggacaaaatgatcattgtctgttctatatggtatcctctcttggagacccataagaaaattttctctttggtctcagtactagaagagttgtttatcgcaagcaattcaatattttatggtatgaatatggatcacattccttcttgactctggctgttagaaagctccgaataaaatctgtggcccatccctcaaatttctccctacctgaattatttatttttatataatagagcataatatgtaaggtagcttaaaataattttggaacaaagtggggtataaatatgctgggcataggggctcacgcctgtgatcccagtactctgggagaccaaggcaggaggattgcttgaggccagaaatttgagaccagcctgggcaacaaagtgagatgccatctctacaaaaaattttaaaaatattagctgggcatggtggcatgtgtccgtagtcccagctactcaggagtatggcttgaccccaggagtttgaggctacagtgagctatgatcacaccactgtactccatccagactgggtgacagagtgagaccctgtctccaaaaataaataaataaataaataaataaataaataaataaataaacaaacaaagagggtggggggcataaataattctccttttgggagacatttaggttgtttatgccttttttttttttttttttaaagacagggtctcactatgttgcccaggctggagtgtagtggctattcacaggtgccattacagtgcaccacagcctcaaattcgtgagctcaagcaatcctcctgcctgagtgccccaagtcctggaactacaggtatgggtcaccaaacccaacttgtttgcaactttttactactaccttaagatcaaaatcttaagtagatttttgtcattattttttcctttagtacaattttcacttttttactcaaggggtcctacatgtttctagttaaggttgctatttatgaaaggttcttcttaacccattaatttttctaactggtcattcctatataggaaagcttttcactttggtatctttactatatgttcagctgtcttattgaactcttattgattttaacacattttcagttgtttttgctttttttttttttacaatcctattatctcaataatgagaattcctttctcaaaatggtaactcttatttctgtctctcatttactgcattagccagaacttccggaattacacaaaacagtaagacagttgccatcctcgtttgtgcccattagaaaatgcctctttgggccaggcgcagtggctcacacctgtaatcccagcactttgggaggccgaggcgggcagatcataaggtcaggagttcaagaccagcctgggcaatatggtgaaaccctatctctatgaaaatacaaaaattatccaggcatggtggcgtgagcctgtagccccagttactcgggaggctgaagcagaagaatcgcttgaacctaggaagcagaggttgcagtgagccgagatcatgccactgcattccagcctgggcaacagagtgagactccatctcaaaaaaaaaaaaagaaaatgcctctttgaacataatgttgattgttagattgaaatatcatctttatgttaataaagcattctaattttcatattttttgaagtcaggaatatgctctgaattctgatttttctctatatattgtcttttattatttatcttatctgacagactaatgggatacattaacacttttttctaattttaaaccatcctttttattcccaggagagattctatttggttgtagcatattgttctttaaatgtactgtactactgaatttattttgctcatatttaattttagatgggatattattgcacattcatggaacatttgcaagccctgtgctaggcactggagtatagagataaaaatgaaatggcagtgaaactattctgtattacactgtaatggtagatacatgacattatacatttcaaaacctatatattcaaaacctgtaattcaaaacctatagaattatacaacacaggctgggcgtggtggctcacgcctataatcccagcactttgggaggcaaaggcgggcaaagcacttgaggtcaggagttcgagatcagcctggtcaacatgatgaaaccccatctctattaaagataaaaaattagccgggcaaggtggcgggcacctgtaatcccagctactggggaggctgaggcaggagaatcgcttgaacctgggaagcagaggttgcactgagccgagatcgagccactgcactccagcctgggcaatagagtgagacactgtctcaaaaaaaaaaaaaaaaaaaaaactgggcgtggtggttcacatctgtaatcccagcactttgggaggccaaggcgtgaggatcagttgaggccaggagttcgagaccagccttgccaacatggtgaaaacccgatgctactaaaaatacaaaaattagctgggcatggttgcgcatgcctgtaatcccagctactctgaaggctgaggcaggagaatcacttgagcccaggaggcagaggctgcagtaagccgagatcacgccactgcactccagcctggacaacagagtgagaccctgtctcaaaacaaaacagaacaaaaacaaaacacaaagaattatacagcacaaagaatgaaccttaaattataaacttaataataattaatcaatattggctcattagttataagaaatgtaccgcactaagatgttaatagcattaataatactcaatttttaggtaaatctaaactgctctaaattataaggtgtattaataataataataacaaagaaatggctgggtgaaacgaggcgtgattggtcatgcctgtaatcccagcactttgggtggctgaggcgggcagatcacttgaggtcaggagttcgagaccagtctggctaacatggcgaaatcccgtctctactaaaaatacaaaaaattacccgggtgtggtggcaggtgcctgtaatcccagctacttgggagagtgaagcaggagaactgctggaaccctggagacggaggttgcagtgagccaagatagcgccactgcactccagtctgggtgacagagtgggactgtctcaaaaaaaaaaaaaaaagaaatggctgggtggggttgtgtacacctataaattccagcactttgggaggccaaggcagggggattgcttgaggtcagaagttcaaggctagcctgggcaacatagcgagacccagtctctacaaaaaaaaaaattaaataattaataataataaagaatgattgggggaaaaagtgattgaaaacaactcaggactgaagatcaaattgaaatatgcaaattgaaacgaatgagtgtgttgtcacaggagaatggcagatcttttttaaaaatatcttacaaatgatatgtttctgtgggaaacagtgatgtccaaacagtaggattccgtaagaacctggttgctatcaaagtctttaataggtataatctcatcatctatcttgttccaataccctggacttttaaggtcagatgccttctgccttaacagaaaaaaaataatggctcaacatatgaaaatgcaaacagcctagcccagaaagacggcctccctagtcctgctgaggaaatggccatgtaacttgaactcactgcaaacactgtccagtacttacaaagcatagccactttctccagatgtggcatctaagtacaagaaagacaaggcttgagtataacttaatctaaaacctcagattgtggctaatgtgccctgctttcagagaagtagcttggagacagataataatggcattgtaagatggcaatacagtttataagaaaaaaaaaagaatataaaatagtagacactcttgtacctaccacctagatttagcaaatgttaacattttgctatgtttgcttctgatttcagtgttaaaagcaatatttaaaagataaaaacaaaacccagcacctatcctatttcctctctctttttgccaaggggtaagctctttttttttcttattttttttgggggggggaaacaggctctcactcccatgcccaggttggaaagcagtggtgcaatctcggctcactgcaacctcaacttccagggctctggtgatgggtattctcctacctctgcctcccgagtatctgggactacaggcgcgcaccaccacatccggctaatttttgggggttttttgggtagagatggggtttcaccatgttgcccaggctcttctcaaactcctgggctcaggcaatccacccaccttggcctcccaaagtgctgagattacaggtgtgagccaccttgcccggctaaggtaagctttatctaatgttgtctgtcattcaaatcagtataggtatgcatatatatatataaactacatatagtagtcatgtattttaatataccttaatgataatatattatgtgtatcatcttgcaacttgcttttccattaagcattatattaaggttttccatattgaaatgtttacatttggtgtattcattttaacttcctcatatttaattgtatgactaaaacagtttctccactgccctattacttatgttgtttaaaattttttactatgaaaaaaatgctgcaataaacattctctacaaatcttcttgtgggaaaaataagaaatgaaatgaacggccttctctgtgagtcatgagacaataaagacttctttctaacagtgattatataatagaatatatgcttgaacccgggaggtggaggttgcagtgagctaagttcgcaccattgcactccagcctgggtaacagagtgagaccccatctgaaaaaaaaaaaaaaaaaaaaggccaggcgtggtggctcatgcctgtaattccagcactctgggaggccagacaggcggatcatctgaggtcaagagttcaagaccagcctggccaatatggtgaaaccccatctccactaaaaatacaaaaattagccaggcatggtggcgggcgcctgtaatcccagctactcgggaggctgaggcaggagaatcacaatcacttgaacccgggaggtggaggttgcacttggccgacaccgtgccactgcactccagcctgggcaacaagagcgaaactccgtctcaaaaaaaaaaaaaatttatatacataatataaaggtaacagagcattctgcggatgacacagtaaggaaagataacctagatcaatgtttttcaatttgtggtttttggaatcaagtaatgggttaaagaaaagaaataattagaagagaatacaaaatatgaaggtgcaaatagtatggatatgtcatgaaattgtttcagttttgtacaaatatatttaacaaatgcatgtatatcatctaatataaaatgcatttcttattgtgacttgataaaaaaaatttttttaaaaaaacgttggtcaaaagttttgaccaaaacattggtcaactcaggggaaaattcacaggagtaaacatgtgaacttagggtgactaggacacatgcctgatctcatggacaactctgaagagggacagacactccatattaatgctaccacagactgtagactacaggagccaagaggtgagaacatgaacaaaagagaaggagccctggggaaagggatcaggaagtgtcaaggcacagaggagggaagtgtgaggctggttcaggagatgctgaacatgccacttagctatggaggtggagtaggagccacagctgggaaggcaaacggagccggatgaggaaggccttgaacgtcatgccaaaaagtttagactacttcacttagtaggctgaggtagtgtttcccaaactgcaggttgagaattaagaacttaaattaccgagccataactagtatttttaaaaattaagtagaatagaaaatgtcagcatgcaccacatacaagggtgagcactgttttgtgaaagttttgtttcagttacatatatatgtgaacacacaaacacacgcaattattcatttggggttttgatgtaaaagttatttcttactaaaggttgtagttaaaaaaaaaaaagttgaaagctactggtcagaagtaagtcatcggtgaatcattatcagtatcagtaggctggttatgaagttctagtatagctatgcaagatgttacagccaggcacggtggctcacacctttaatcccaacactttgggaggctgaggtgggtggatcagagagagaaatgacactaatgaaaagtctgctattaacctcctagatgacaacagcaattctgaaccacttagaggcaattcacccttcaagaggtcaatttcccttttctctggctgatgtgttccccactatcttttctgtactacatgaggggctcctggcaaatggcttcctgaagacatcaaagatgagtaccaaggtactaactacttaggaataaactggtaatcccatttttccttcggcattttcttcctttagtttttctctttttattctttttttttttttgagggaggggcattcttcaaaaggaggaaaatgaactatgtataatgtattactgagcatctcacaaggatttcaaagctactttctaagagattgtttatttttattttttattttttttgagacagagtctctctctgtcacctaggctggagtgcagtggcacaatctcggcttaatgaaacctccacctcccaggttcaagcaattctcccacctcagcctcccgagtagctgggattacaggcatgcgccatcacactcggctaattttttgcatttttagtagaaatgggatttccccacgttggccagagtggtctcgaactcctgacctcaagcgatccacccacctcagcctcccaaagtgctgggattacaggcgtgagccactgtgcccggccttaatattactattattttgagatggagtcttgttctgttgcccaggctggagtgcagtggcatgatctcagctcactgcaagctccacctcccaggttcacgccattctcctgcctcagcctcccgagtagctgggactataggcgcctggcaccatgcccagctaattttttgtatttttagtagagacggggtttcactgtgttagccaggattatctcaatctccttacctcgtgatccactcaccttggcctcccaaagtgctgggtttacaggcgtgagctactgcacccagtccctgtttttctgagacagtgtctcactctgatgcccgggctggagtgcagtggggcaatctcgactcactgcagccttcacctcccgggttcaagcaatttttgtgcctcagcctcccaagtaggtaggactacaggcatgacccatgcctggctaattttcgcattttcagtagagacagggtttcaccatggtagccaggatggtctcgaacttctgacctcaagtgatccacctgcctcggcctcccaaagtgctgggattacaggcgtgagccaccacacccaaccagaaattgtttctttttaaaagatctaattaaacttttaaagataattgtagactcatgtgtagttgttaaaaaacaatacagagagatcccacatactctttcaggctcactgcaacctccgcctcctgggttcaagtgattctccttgagtagctgagattacaggtgcccgccaccatgcctggctattttttgtatttttagtagagacggggtttcaacatgttggccaggctggtcttgaactcctgacctcaggtgatccacccacctcagcctcccaaagtgttgggattacaagtgtgagccaccgtgcctggctgtaacatcttgcatagctatactagaacttcataaccagcctactgatactggtaatgattcaccgattttcagatttcaccaggtctgcatgcattcatttgtgtgtgcctatctaattagttcagtgcaattttactctatgtgcaaagttgggtaatcacaaccacagttgatacagaacacttttatcacaagaatttcatgttatcctttagaaagtcttttatcttataaatccaaatactctacttccacagaagtcttgaaatttttcacccagatctaagccttggctgaagactccagttaagctcactgcccacactgtaagaaacaaacttgagtgacacatttagtcttggcattcatgtcacttaaatgataaatataactatgcaggaaaatgcaaaagtatatataggctgggcatggtggctcacgcctgtaatcccggcactttgggaggccaaagtgggcagatcacttgaggtcaagagtttgagataagcctggccaacatggtgaaatgctgtttcaactaaaaacacaaaaattagccagccatggtggcgcatgcctgtagtcccagctactcaggaggctgaggtgagagaatggcttgaacctgggaggcggaggttgcagtgagctgggatcacaccactgcactccatccagcctgggcgacagagggagactgtctcaaaaaaaaaaaaaaaagtattatgaaagtattatgatcatacatttgttaaaaatctatgtctaggaatatgtatacataaatagttggagaggtaatggtgggcatgcagaaatgtaaacatccgacatactaggctggtgggataagttgttcttcttttccttttatgtattgaaagttgatgtatgcctgaggtctcaggataacagcggagaagactgagatttatgttcagagtactttttgcagctgccagtactagggctcagaaagggaagtgcaagggaagggccaagaagggatccaggagttgagtggccaactgtcttggcatacccacagctaaggagttttccagaacatagtacttttggtgctaaaacctgggcaaacttggaagagttggttgccctgtctcgaaggttgttgtctgtgcttccttggagcttgaagcaaccaacaaaccttttgtttttggtgttgaggttcagcacctgggggtagggaagtgtggaaggataatttagaagagaataaggtgaccatgacactttctgaacacctcagcatccagcttccttcagcctacaaagttaccatagctgcgttatacaatctgattttgagtctcatagagatgtaatgaaaagtaattctggcagacacacatattttaaagactagactcaaacaggttacagaagggaaaaaaaagaagaagaaaagattacctgtcaagtaagagaaaagcatttcacctcaaagagtgggtggaatatcaatgcactgagcaatttcataaattgggcacttcagcttttaaagaagtgcactacttcttataatttctaaattgagttacctgtccatccatgaaaaaagtttgactcatgtgcctttttcttacaactggttaaaatgaaagacagttgtcccagcccatcccacacagttacccaccagtgagaggtatgcaaaaaaaccagaacacaggttagagccccaaagaagcctgcagttttataccacgtggagccaagtcaccctctaagggcttaacatgtgctaggcacaagtagactcagtttttcctctttatttttaatttttatttatttatttatttattgagacaagagttttgctcttgttgcccaggctggagtgcaatggcgcgatctcggctcactgcaacctccccgtcgtgggttcaagcgattctcctgcctcagcctcctgagtagctgggattacaggcacccaccaccacacccaactaatttttttgtatttttagtagagacgaggtttcaccatgtttgccagcctggtcttaaactcctgacagcctggtcttaaactcctgacctcaggtgattcacccaccttggcctcccaaagtgctaggattacaggcgtgagccactgcacccaacctatttttattttttgagacggagtcttgctgtgtcacctcggctggagagcaatggtacgatcttggctcactgcaacctccgtctcctgggttcaagcgattctcctgcctcagcctcctgagtaactggtattacaggcatgcaccaccacacccagctaatttttttatttctagtagagatggggtttcaccatgttggccaggctggtctcgaactcctgaccttgtcatctgcccacttgggcctcccaaaatgctggcatcataggcatgaaccaccacactcggcctttttactttttttttttttttttttttttttgagatggagtctcactctgtcacccaggctggagtgcaatggtgcaatctcagctcactgcaacctccacctcctgggctcaagcgattgtcctgtctcagcctcctgagtagctgggattataggcacacaccatcatgcccagctgatttttgtattttcagtagagatggggtttcactatgttggctaggctggtctcgaactcctgacctcaggtgatccgcccaccttggcctcccacaatgctgggattacaggcgttgagtgagccaccgcacccagcccagtttttacgtttaagaaatgtataggctcaaaacaaggcacagataagccgtctttctcctgagagactcagtctcaaaacaagatctacaaaggtttttactaccatttactcagcaccttagtaacagtgtcagcaaaattctacgggaacccaggtgaggtggccagtctctccaacataaaacctgaccctaaccctaaccctttccctctcctccatggcctactccatctgctcttgcttctctcctgaattttcaacttacctctgactactgaaacctatcgtcaacatgtaaacacattcaaggctcttctgccaactcctcccacaaaaaaccacgctggtttaatggtgcatctttcttagggttaccagatttttttttttcaacttttattttagattcaggagacacatgtgcaggtttgttacctgggtatattgcatgatgcttaaggtttggggtacaaataatcatgtcacccaggtactgagcatagtactaacagtttgtttttcaacctttgctgccccctctcccctccctctctcccatctatttttttttttagggttgccagatttttttttttttttttttttagactgagtctcactctgtcacccaggcttgagtgcagtggcacaatctcagctcactgcaacctctgcctcccaggttcaagtgattctcctgcctcagcctcccaagtagctgggattacagacacgtgccatcatgcccggctaatttctgtattttcagtagagacggggtttcaacatgttggacaggctagtcttgaactcctgacctcaggtgatccgcccgcctcagcctcccaaagtgctgggattatagatgtaagccaccacacccggccagttgccaggtttaacaaataaaaataaagaatgttcacttaatctgaaaagtggtgtgtgctgaaaaaattttaaaaataaagaatatttgctgcatattatatttattgaacaatcagcaaactaggaataaaaaataacttcctcatcaggtgtggtggctcacacctgtaatcccaacactttgggaggccgaggcaggtggattacctgaggtcaggagtttttgataccagcctgaccaacatggagaaaccccgtctctactaaaaatacaaagttagctgggggtggtgcatgcctgtaatcctagctccttgggaggcttaggcaggagaatcacttgaacccgggaggcggaggttgtggttagccgagattatgccattgcactccggcctgggcaacaagagcgaaactccgtctcaaaaaaataaataaataaaaataaaaaataacttcctcaacatgataaaaggtttataaaaaccccatagttaacatcatactcagccgggagtggtggctcatgcctgtaatcccaacactttgagagactgaagcaggagtattgcttgagcccaagagttcaagaccagccttggcaacatagaaagactccactctacaaaatataaaaatttagccagatgtcgtagtgtgcccacaggtggtcccagctacttggaaggctgaggcaggaggatcacttgaacctgggattttgaggctgcagtgagccataatcatcccactgcactccagcctgggcaacagagtgagaccctttttcttttcttttcttttcttttttttttgcctcagctacttggaaggctgaggcaaaagggatcacctgagtccaggaggtcgaggctgcggtgagccatgatagtgccactgcactcccagtatgggcaacagggtgagacagtctcaaaaagaaaaaaaaaaaaaaaaggtcagtattggtggctcacacctataatcccagcactctgggaggccaaggtgggcagatcacttgaggccaggagttcgagaccagcctgggcaacatggtgaaaccccatctctactaaaaatacaaaaaaaaattggccaggcatggtggcttatgcctgtaatctcagcactttgggatgccaaggtgggcagataacctgaggtcaggagtttgagaccagcctggccaatttggcgaaacactgtctctactaaaaatacaaaaaaaatcacccaggcgtagtggtgggtgcctataatcctagctactatggaggctgaggcaggagaatctcttgaacccgggaggtggaggttgcagtgagctgagatcgtgctactacactccagcctgggtgacagagtgagactccgtctcaaaaaaaaaaaaaaaaaaaaggtgccgggcttggtggcacactcctgtaatcccagctacttgggtggctgaggcacgagaatcgcttgtacctgggtggcagaagctgcagtgagcagagatcacgctactgcactccagcctgggcgacagagagaaactctgtctcaaaaaaaaaaaaaaaaaaaagaaaagtatgtgtatatacccaatggtaggtgaaagactggaaacattcccctaaaatccagaacaagacaaagatgcctactttcattgtttgtattcgatatcttattagaagttccaaccagagcaataaggcaagaaaaaagaaaaaaaaggaatccaaagtggaaaagaagatataaaactgtattcacagatgaaaagagcctatatataggaaattctgaaaaattcacacagcaacaaaaaaaattattagggctaacaaatgaatattaagcacaatagcaggttaatcatctgtcttttttttttttttttttttttttttgagacagagtctctggctctgttacccaggctggagtacagtggcatgatctcaactcaatgcaacctctctgcctcctaggctcaagtgattctcatgcttcagcctcctgagttgctaaggtgtgtgccaccacatctggctaatttttgcatttttagtagagacaggtttcaccatgttggcaaggctggtctcaaactcctggcctcaagtggtctgcccgcctcagcttcccagagtgctgggattacaggtgtgagccgccatgcctgattaatcatctgtatttctaaacactcacaattaacaactcataaaagaagttttaaaaacaattgcatctacaatagcataaaaaagaataaaataattaggaataaagttaacatcggggtacagtggctcacacctgtaatcccagcactttgggaggccgaggtgggtggatcacgaggtcaggagttcaagaccagcctggccaagatggcgaaaccctgtctctattaaaaatacaaaaaattagctgggcgtggtggcaggtgcctgtaatcccagctactcgggaggctgggcagagaactgcctgaacctgggaggcggagcttgcagtgagtcgagatcgcaccactgcactccagctgggtgacagagtgagactccgtctcaaaaaaacaaaaaaaaaattagccagttatggtggcatgcacctgtagtaccagctacttgggaggctgaggttagaggatcgcttgagcccaggatttgaggctgcagtgagctacgatcacatcattgcactccagcctgggtgacagagcgagaccctatatcaaacaaaacaaaacaaaaaactaagaaaatgtaagatttatacactgaaaactataaaacattcctgaattaaaaatctaaataaattaaaagatatataccatgattatggattagaaggcttaatactgtcaagatggcaaaattccccaaagcaaacgacagattcaatactgtccctatcaaaagcccaaaggcttttcttgcagaaatgggcaaactgatcctaaaattcatatggaagtgcaaggaccatgagtagccaaaacaatattgaaaaataacaaagttggaggactcatacttcccaattatgtggtattggcataagaatagatgaatggaatagaaatgaaaatccataaataaccccccacatgtatggtcaattgatttgacacagatgccaaaaccattcaatgcaggaagaatatcctcttcaacaaatgatgctgggacaactagatatccacatgcaaaagaatgaagttggactgttccctcatgctacatataaaaattaactcaatgtgatcaaagacctaaatataaagagctcaaactatgagaaaagacataggggtaaatctccctgaccttggacttggcaatggtttcttaaatatgataccaaaagcacaagcaactaaagaaaaaataataaattgggcttcaacaaaattaaaaacagaaagtgaagacaactcacagaatgggagaaactatttgcaaatcacatatattgtatctgttacctgtattatgttacttatatatatacaatctccttatgtttgtgctctaacataaccaaacctgaatcccaccagacttcctaatataacacatagcatgtttccttctcatctgagctacttgctatgaaaaccattctgcctaagcgtcagacttgggaaccattggcccaacaggtgcttgtgtaattctgttcttctaggtccaattttaagaagaaaaatatgagggtagggggagtttatgcaagacaagtagaaatgtgaaagagggagctaaaagaaaaatattaagttcaccaattctgaaatggctcttaaagcaaaaggaatcagcaactaaggacaaacaaccacatctaaacaagaataagaattttaattttagagcacgtgaaaagatgtgttggaggaaaaatcctgaaatataagtgaagctttgagagccttttttttttttgacagggtctcactctgtcagccaggtgggagtgcactgacacaatcacagctctctgcagtcttgaccttctaaactacggtgatcctcccacctcagcctcctaagtagctggactacaggtgtgcatcaccatgcccagctaattttttgtatttttagtagagatggggttttgccatgttgctggtctggaactcctgggttcaagagatcacccaaagtgctgggactacagacctgagtcaccacacttggcctttttttccttttttttttttttttgagttagggtcttgctctgtcatccaggctaaagcacagtggtgtcatctcagctcactgcagcctcaacctcccaggctcaacagatcctcccacccagcctcctgagtagctaggactgcgggggcacaccaccacgcctggctaattttatttttttgcagaggcaaggtctcactatgttggccaggctggtctcaaactcctggactcaagcaatcttcccactttggcctcctaaaggctgagataacaggcatgagccaccacatccagcatgagattcttattttaaaacaaggtataggccagccacagtggctcatgcctgtaatcccagcactttgggaggccaaggtgagtggatcatctgaggtcaggagtgtgagaccagcctgaacaacatggtgaaaccccatctcaaataaaaatgcaaaaattagctgggcgtggtggtgggcgcctgtaaccccagctactcaggtggctgaggcaggagaactgcctgaacctgggaggcagagcttgcagtgagccaagatcgcgccattgctctccaacctgggcaaccgagggagactccgtctcaaaaaaaaaaaaaaggccagacgcggtggctcacacctgtaatcccagcatttgggaggccaaggcaggcggatcaccggaagtcaggagttcaagaccagcctggtcaacatggagaaaccccgtttctgctaaaaagacaaaaattatccaggtgtagtgatacgcgcctgtagtctcagctactcgggaggatgaggcaggagaattgtttgaatctgggaggcggaggttgcagtgagctgagattgtgccactgcattccagcctgggtgacagagcgagactccatctcaaaaaacaaacaaaaaaactggctttaaaaaaaaaaaaaatctgtaagggtggggggagggtctccagaaaagaataaaatttttaaaaattggctttatataatgtctgactatacttttattctaaaaactctgtgacataaggctggtaaacagaaagaaaaatccaacaaggacttacttgaccgtaggacatattaagatgtttattatttactaagagtaacatgtatacatttgcagtaatttgtacaatccaactacattacaattcacagtaacatacactagctctaacctgccttggatacaattaagtctcctcaacacactattttatcgccaaacttacattctggcttttataatcattttgcaacacctggtacagtatacacctatagctttgccatagaaatgcccctaaatgcccttcagagagcagaggtgaatactttctcatgaagaaacgccaacttttctaagcgagttcgtttcagtagtgggagccattcccagtaggataactctaccacacggtagccaagccgagccagctgccgcctcttcatattgtgcagtccaaggagatccctggagccatagcaatactggttcctgtttgtgaactgaacagccagcttcattcttggggtctgcatgcaggctgcggggcacaggccagccatctccatggcccctgatttatctgctacattgcaaaggaagccccccagaggtacagctgccttattctccaactccatgggctgctgcccaggctctgactcagttttgccctggaaatgtcctcttgctttcccttttagtaacttattcatcaaatcatctgtaaggctgactcccacatgctcaagccttaatttggctacattttcagccggcgtggcttctctattaaatggtaatggcttcaggttaacatcaagctggacctctaagtcagaagatcgggtatgaggcaaaatcatatggtgcttgacgtactggggcccccccagcatggtctccagtaaaaagacagtttctaagaattcaggctttgaattcatatccttctctgctaaataccacagcaattcagacccctcttgctgaaggtgagtactaagacgattgcctctgtaatctggacactcaatgccaactgtaccatcgagggtatatagttccttaaggaggtcaaacttagttctctcctgagctaacctgacaaaccctggactgagagcgaaatcaattaactctactggaaagtactccaaaaatgccaggcccagcaggcaggtgggcaggtgttctgggtactggttgaattcaggcatctttctgtgaatctcacttatcaggctggagtaaaattcttctgcattgggtggcttataattcagagttccaaatgaccacagaatcttggcaacatctttacttcgacagtgtgccactctaggaggcaaagacgcagccactgcattcattactccttcattcaggaagcgtaaggccgagcagtaaagagtcaggtgcatgacaccttgaactcccagggaaggaattcgctgaggagctatctctccaatctgcttcatgaaattgatgtgatccacgtgagtgaaacggaacattttaacaatattcactaaggagcgactactcagatgctgaatgttagcacaagccaagtctccaattttccgcatgacaaattcagagagattagtacttgatttaaagaaccccaaacagatggtaccaacctcctccaaattgatcaaatctatatatttaaggatcaatgattccaatttttgcattaggtcctgggatacctgacgattttcacctataacataaattaagtgaactagctgagacaaggatagatccttccagtgcaaattaagataactagaaaaaatgtttaaaaacctaggtactttgcggcctaagtacctccagagatcagccaccaaaaggagctgatccatattcatctcccatacctgatggcaacacttggtctcatacacatctagcattgaatgggagtgagggattcctaaaatgacaaaagctttcaaaacattgatcagatcttgggtatcaaagagctgtatcttcttcacactcagctggcagagcagagcaaagctggtactgcccagcaagacaggatgctgctctgcaggcaaagagctcagcttacacaaataatcaacaatgacttgagcctggagattattttgattaactctgactttgtgcaaaattagttcaccttctgaaacagacaggagctgagaagtctcagatgcattatagctgtgaacacggtattctggtcttagctgtaggaaaactcgcatgttttcaaaggaatcaaacacttctacgtcctcttcatcaactcctgtggccctgggtgagcccagctgcaatgtactggccttagaggaagaagtcttgctgaattccaaacctgggtgggcactgctggttgtcaggattctccgagaagagaaggtgctacatatgttcttaacttttttggcagaatggcagaggctaatgtgttctggagggtcctgtcccccatgctgtgtgctgctcacattccagtatgacacacttcggactgcaccaaaggcagaaggactgcaaaatgctcggtatcttacaagttttaatgacttgagagtagctgccattctggtgtcagtattgatctctttggcagtcagaatacagtcctcacagatttgaccaggcaatttcttgtttatatggtgcttgattagagctggacggggaggtgttccacaaaaactgcctggaaatcttcagcatatcacaagagccagggatcacaaatgactgggtcagaattggtgccagatactgaaaaaagggtagatgaagaatgagtggcttctacctataaaagcatccaaatttacacattataaaaaacaggttgaaactacactgctgtctactcaaataagttcaatgctagtaaatgcccaaaccacatgacagcatatatcaaggataaattctgcggtctgtgtaaaggcctaggaaaacccccaacccagggtacccgtgggcagttcctggactgctgctcaccagacttccttcactgtacaaggcaagcagtgacggctaaagaagagacggtgctccgctaacatttgataggaagaaggaaggcagatttctagaaagaaggctgggaacaaaagtgagcaactccttccatctctttgatatcaaggcaaacaggtcctacctgaagaatgtttataaaaactgctatgctaacagcactaagtaaaaagtgggatctggtataaaagataattagttggctgggtgtgggtggctcatgcctgtaatgccagcactttgggaggccgaggcaggcagatcacttgaggtcaggagttcaagaccagcctggccaacaaggcgaaatcccgtctctattaaaaatacaaaaaattacccaggtgtggcagcacacacctgtaatcccagctactcaggaggctgaggcaggagaatcccttgaacccaggaggcagaggttgcggtgagccaagaccgtgccactgcactccagcctaggcgaaaaagtgagactccatctcaaaaaaaaaaaaaaaagatttaattagttatacctacgataaccctccctgttcttatagcgcaaaactgttaattccaaaattctgtcattctaatgctgttcttttactttttagaagatgcctactctcctcttcaggaagcttataacagaatttgagtcactattagagagtagtcacagagtaatggtgttattagaaagtatactaaaaaactcactcattttggtgggagaaagcagaaggttgagggtctgctcactgtcacttcacgggtgggaagcaaagagtaccccaaagctgggctcagggttcagggaacgccaattgacgcaactgccccgctgacatcttctggagaaggcagcttagcaatgtttccagtgagtctttattctgcctgtgagcagtataatgcccatttttctcccatggcagaaaccatgagagactatgaaattgattctgctgtgctctcgctttccttaatgcttattctttttctttccacttaagtgccaaagcctgacaagcaagacccaaggagacctgagttgtcaactgatgtaccagacagggctgttgctgcagaaaactccataaaagttccaagggtgccagaatgactttctgaaatgcctgcctaactctgctgtcagccactttcttccagagcccatagcacatcatcatttagttcatcaaagaacagcagggcaggtcagtggctctgttccagtagcccagctacacaggcttctctagatggcaggaacatatgtatgaatttctgtgtgaatcagagcagaattctctcacattaaatttttatacacttggttctttactgtggcttgtggaccattctttttttcttttttgagacagtctcactctgtcacccaggttggagtatagtggcatgataactgcagctttgacctcccacttcaagcaatcctcccacttcagcctcagcctcttgaagtagcaaaaactacaggtgcacaccaccaaacccagttagtgtgtgtttgtgtgtgtgtttgtgtgtgtgtgtgtgtggagatggagtctcacaatgttgccaaggctggtctcaaactcctgggctcaagtgatcctcctaccctggcctcctgaagtgctagtattacaggcatcagccaccatgcctgaccacctgtggaccattctgcccaccaaatttcaatctgtggttcagatcaagggtgagcagactatgtcctggggcccaaatctagctcttcacatgtttttgtaaacaaggttttttcagaacatagctaggccattcattatatattgtctatgtctgctttcctgctacaagagcagaactgtgtaactgtggcagattgtatggcctgcaaagcatatttagtgtttggtctattacataaaaagtctgctgatctctgctacacactatttctataaatgcagatagccagctttttaaaaattagaaaaacttggccacgcctataatcccaacactttgggaagctgaggcagaaggattgcttgaggccaggagtttgagaccagcctgaacaacacagcaagactgtctaaaaaataaaataaaataaaaaataaattaaaaaaataaaaaattttaattaaaattggaaaaactatagaaaaatagtactaaaataatgtttttctttaatatttagatgataattgaagattacagtcctcaaaatagtcattaggaaatccaattaatactacagcacaggaaaggtgggaacaaaagagacagcaggatggccaggcgtggtggctcatgcctgtaattccagcactttgagaggccaaggcaggcagatcacttgaggtcaggagttcgagaccagcctggccatcatggtgaaaccctatctctactacaaatacaaaaattagccaggtgtggtggcatgagcgtgtaatcccagccactcggggggctggggcacaagagtcgcttgaacccaggaggcggaggttgcagtgagccaagatggtgccactgcactgcagcctgggtgacagagactctgtctcaaaaaaaaaaaaaaaaaaaaaagaaccaaaaaaacagagatagcaggtaacagaactctccagctgacagaacagggcttttaagaagacctatttttggctgggcacagtgactcatgtctgtaatcccagcactttgggaggctgaggcgggtggatctatgaggtcaggcattcgagaccagcctggccaacatagtgaaactctgtctctactaaaaatacaaaaaattagccaggcgtggtggtgggcgcctgcaattgcagctggggcacctgcaatcccagctactcgggaggctgaggcgggagaatcacttgaacctgggaggcagaggttgcagtgagctgagatagcgccactgcactgcagcccgggcgatagtgcaagactctgtctcaaaaaaaaagaagaggaagacctactttcgaatttggaatttaatttaatccaccacaatgtgcaactaaagccatatactgttcaaatctgtagtcttcatctcatttgaggaaggagatcctggccaggcacagtggctcacacctataatcccagcacttcaggaggccaaggtgggcggaccacttgaggacaggagttcaagaccagcctagccaatatggggaaacgccatctctactaaaaatacaaaaattagctgggcgtggtagtgcgcctgtaatcccagctacttgagaggctgaggcaggagaattgcttgaatccaggaggcagaggttgcagtgagctgagatcatactactgcattgcagcctgggcgaaagagcaagactgtctcaaaaaaaaaaaaaagtagatcctaaaaaaatagatttaaaggtcccattttttaaataaaatagctgtgccatagtaaagcgaaaaacagaaaatgtctgtctagaaggaggctggtttacaagataaatgtgtggcaggcatcaacacatgaaaaagtacacactaatattgagtggaacaaatagcacataaacaagaattaacaaatatctctataaatgatattaattttaaaacattaaataattaaaattacttcaattaattctacctaagagtacttaatgaaattactatacgtggtctggaaataaaagaaccatctcctagaacatcaatgtttggtgcagctccagtgttttgaattcatgtgacactttttgatttgtaaaaacacaggctaagatccaagatggaaataaccagagctatgccttagggcctcctctgtgccaaggcttagagccttgtaaagctgctttatctgcattagttcccatccttataacatctctgtaatgtaagtttataatccccatattactgatgagaaagagaccacaagattaagaaacctgccaaaagttacacagccaagggattgagtggagcctaatattaaagactgtctgactcttcagcccacattattggtgtactagagagacaagaatggatgtcagaaaacaggttcggggggcagtacggggtgggatggctgaacaatctatggtcttctaggatttccaggtgccagggagctggagggttagaactaggtaagcttgaaagtcccttccacctctaacagtctacgattctatcactacggtttatactgcaagttgagtatcccttgtccaaaatgcttgagaccagaagtgtttcagattttaaactttttcagtttttggactatgtgctttatactgaccagtgagcattccaaattcaaaaatccaaaatctgaaatactccaatcatttttttttcctttgagtatcatgttggtgctcaaaaagtttcagattttggagcattttgcattttggagtttcaggtttggaatgctcaacctgtactttaaaaaagaacaaagagaagacctcaaaggctgaaatctacatgaggcaaagagttcgcaggatgctccaggatcaaagtaaggagagctaccacaattgaagacctgaaagttggcagtagagatatgggatccagaaactagggttcaatacagagaagcaaagggaaatcccaggaaaaaggtgaaggaagatcccaggacaagagctgtgaacagacataaagagcaaccagctcatgctggacgacatagacagtacccaggagaggagaatcatacttctaccggataatccgggcatgaacaagagataaggatacaaaaagccatgctaataaaaacagtaacaaaaattattaatgccagggaagacaaaaaagttatacaagatagaatatgttaccacaggcaggatgcaatggcccattcctgtaatcatagtactctgggaggccaaagtgagaagatcacttgaggccgggagtttgagaccagcctgggcaatgtagtgagacccccacctctacaaaatatttagaaattagccaagcctggtggcacacacctgtggtcctagctactcaggaggtagaagtgggaaggttgcttgagcccaaaaagttaaggctgcagtgagctgtgatcctgctatggcagggtgacagagagagaccctatctcaaaaaataaataaataaataaaaagagtaaagaaaatattagtatatcatactccctattcagttgagaataatactaacataattttattaatataaatcttgatattagcctaaccaaaaattatgagcaaactatattgggaggataaagtgagtaagaggaggagtagggggaggttgatgatacaagagacctagagcctcaaagtccataataaagaagtacaattggacaggtgtggtggctcacaactgtaatcccaatattttgggaggctgaggcaggaggatcacttgaacccaggaggcagaggttgcagtgaaccaagatcgtgccactgcactccagcctgggcgacagagcaagacacagtctcaaaaaaaaaaaaaaaaaaaagaaaagaaaagaaaagaaaaaataaatatagtgatggccaggatcagtgagtggctcacacctgtaatcccagcactttgggaagctgaggtgggcggattgctttaggccaggagttctagaccagcctgggtaacatggtgaaaccctgtctctactaaaaatacaaaaagtaggctgggcacagcggctcaagtctgtaatcccagcactttggaaggctgaggcaggaggatcacctgaggtcaggagtttgagaccagcctggccaacgtggcgaaaccacgtctctcctaaaaatacaaaaaattagccaggcatggtggcaggcacctgtaatctcagctactcagaaggccgaggcaggagaatcacttgaacccgcgaggcagaggttgtggtgaggcgaggtcgcaccactgcactccagtctgggcaacagagcgaaactccatctcaaaaaaaaaaagtgggtcgggagaggaaactattatttagtgttacaagctctactgaactatttgactgtttaaaccatgtacatgtacaattttgacaaaaattaaattaaaaaatccatgtattatgaagatattatggtattgttcaagataatgaatggagaaagtagcttaatagataaggaaaatgttgaaaagttatttttagtgcaagcactttctactacctaagaacttctttaaagatgttcaataacagaaatgataacaaaataaggaatcttagaggcatgaagagccaacctacaaatggtaaacagtggctacttactcttttcactatgcaacatttacagtaactctatagaaactgtatctacatacacaggtctgaaacagaggacttcagaagttggtcttgagtactgtggagaaggaaagaaaaacaaggaagatacagaagcagcagagaagaacagtagggagaaaagacactgcaaagaagcagcagtcaggatgaccagatagcgaaaacatacctgagaaggttagttcctccttactcaaagactctcagaaaatccataggaaagctggaaagagaacactatgagatgctcagtcaattaacttctgactcttttttttttttttttttttgagacagagtcttgctctgttgcccaggctggagtgcagtggcgtgatctcagctcactgcaacctctgcatcccgggtttaagtaattctcctgcctcagcctcccaagtagctgagactaaaggctcacgccaacatgcccacctaatttttttgtattttttggtagagacggggttttgccatgttggtcaggctggtctcaaactcctggcctcaagtgatccacctgccttggcctcccaaagtactgagtacaggcaggagccaccacgcccggcctgactctttcaataaaggtcaaagatacctgatatgatttcacaaaactcctttcctagtttaagtgccccaagtatacctttctcccctttaggggtcctaacgaaacagagtagagcctcagacactcctggaccctgtcagttccaaaaggcaatgcccaaacctccctgaatgatgtgatttcacaggactgaagaatcttacctttctcccttccacataccggtctgagcagagccgaatagcttcattttaaactagagtctagaagttagaggaggggggccaggcagaggaaggagcgatgctaactgtagactgagtataagacaccttaaacacatacaatttaccacttaccagatctgatccctcaattctaacacttttcctttctatgtcccaataaaattgccacaaataaatgaacactccaaccctattcttgtctcagcaaataatttgttgagcaaccttaagaattaaaaaggcaaaaaaactggctagacaggtggctcatgaccataatcccagcactttggaaggccgagcaggcagatcacgtgaggccaggagttcaagaccagtctgggctacatggcgagaccctgtctctaccaaaaaaaaagggcaaaaaaaccgaactttctctaggtgctgaggtattctgctgagaatctacaaaacttcaaagcccctagtgagggcttagagactggcagtaaggaccttagctgttaatgtggatgttaactgggctagactcttctgtgtttctgtttccacacgggagcagggcctcagagaggagtctaccagtactgcgaaggtgaagcactagtgcaaaggtgtttaggtcaagttcagtgtcactcgcaggtctaagccaaactaaaattattcagtctagcaatccatcccttcctttttgttctagactccatgctgataggagaaaaacagcacatcacaaacatttgtgaaactttttcagctacacagcccttccgcttctcttttaagactctgctattcctctatcagaatggcaagaaggatgtgggtagatatagtatgactaagccctgtagatgattctgttagagctactgcttttaaagggtttcataaaaccctgtctttagaaaacctctccatataacaacaggcagtaggcactcatgtcctctcagcccatctaaatggggcttctagaggaattacaaaatccaggcaggtaaagagaagtagctgcatgcacacagtcgtcataagagaaaattcccaaataaatggtccaagtacctataactgttagctcaataaacacttggttttatctgcttttacaatttgcaaggctgtatagaggctgtatagtacatacttcagacaaataaagaaggagtttcagaattcttttgttttttttttcagacagggtctcgctctgttgttcagtctggagggcagtggtgcaatctccgctcactgcatcctcgaccactgccccccacctctcaccccggcaacctcccgggcgaggatcgctcaaggatctcaaacgatcctcccacctcagcctcctaagtagcttggactacaagcccaccaccacgcctggctacattttgtttttttgtgtgttttttttgttttttgtttttttcgtagagacagagtttccctatgttgcccccaggttggtctcgaactcctgggctcaagtaatccttccacttcggcctcccaaagtgctgggattacaggcatgagccaccgcacctgaccttagaattattttatatcaaagttgacttattcacatgatgaatggcaaggccttattagggactaaaaaaataaaccaatggatggggaagaaaatcatactgactaataaacattagacctgcataactgccaaaggcctcactttttaagttatgttatgcagcacagagtcttcagattttatttacttatttatttatttatttattcatttatttgagacggactctcgctctctcgcccaggctggagtgcagtggcgcgatctcggctcactgcacactccgcctcccggggttcacgccacgctcctgcctcagcctccagagtagctgggactacaggcgcccgccaccacgcccagctatttttttgtatttttagtagagacggggtttcaccatattagccaagatggtctcgatctcctgacctcgtgatccgcccgccttgacctcccaaagtgctgggattacaggcgtgagccactgtgtccggcccagattttattttagtctaccaggtagtagcaaactatccaaggacttgcccaggaccattcaggtcagtgagctacagaatctagttctggaaaggcagccattcttactattcacaaagtgtagaaaacgtgaattcagattccagcagcaacaaatgactggagcacaaaacgccagccacagttggtgctaacgcagctggctatcagctccacaggatgaagcactgtccaagggtctgatcagtgaagcatcacccaagactgatgaacacagctgatatgaggggacccaaagttccctgagtcaagacagaagagctgtgtcacggtttgcacagaaagagaaagagcaactattcttacccacggaaagaaaaagggagaaggccatcaatactacccttaggcttgtgcaacgagaaactgctaaaaatggggggaaggtatatatcctatcatactgatgtttaccgaagactccgcatcccaaatgctaagcaacatactgtagggccttgctactcagtgtgtggtctgcgtgccagaggcttcagcctcgtctggaatctagttaggaacacagttatctcagaacccaccccagtcctacagaatcagaatctctaagcgattcgcaggcacatcaaagtgtgatgagaggcgcggcagaatatctgactacattctcttaacagcaccgtgagacaagtactgttacgatctccatttcacagaggaaaaaaaatcaagggtcagataagccccctgccaaagatcacaaactcaggagcggcgagagtcactgaagttctcaccacagccaggcctgcgagaggcactggcaacccaggccaagagctgaacaaggcctcgatgcgctccagctctgggccggccgggaggacaggaggcacaggccaaggcccaggacggtcgtgaacgcggaaagaggccgccgcgacctcctccccggccgccgccactcacctgatcctcccgaaggtgggcgccgcaacaccaaaccggggacgccgcgggcggcggcgacacagatactggctcctccggcgactccgagcctcacagccccacttccggccaactgcccgctacttccgcctgctgcgcgagtgacggatgcggccgaggctcaaaagactctgtcagcgtttcccaaggacattttccactggaggacgttgttgaggaggcagggggagtctaggacctgcagagggaaaacaccttcctggatggatcgctctggaagtcattaagcagcttagtcccggcgcggtggctcacgcctgtaatcccagtactttgggaggccaaggcgggcggatcacctgagttcaggagttcgagaccagcctggctaacgtggtgaaacccccgtctctactaaaaatacaaaaattagccgggcgtggtggcgcacgcctataatccagctattcaggaagcggaagcaggagagtcgcttgaacccgggaggcggaggttgcagtgagccgatatctcgccactgtactccagtctgggcacccctgtactccagctctgggacacagagcgagactccatctaaaaaaaaaaaaaaaaaaaaaaaagtaagtagcttagacacatgttcaaatctgaggaccaccactcagggttttatggccttggagaagtcacataaattcattcttgttatattattattattattttcatagagacggggatggcagtgtcttcctatgttgcccaggctagtctcgaactcctgggctcatgcaatactgccgcctcagcctccgaaagtactgggattacaggtatgagccatcgcacccggcccacataaattctctaagcctgtacagtgagaaaaacaatacattttttttttttttgagacaaagtcttgccccattgcccaggctggggtgcaatggtgcaatcatggctcactgcagcctcaacctcctgggttcaagtgatcctcctgcctcagcctcctgagtagctaagaccacaggcatgcaccaccacacctgtctaattttaacaatgcattggtcgggtgtggtggctcacacctgtaatccccggtgttggagaccggcctggccaacatggtgaaacctcgtctctactaaaaatacaaaaaaaaattagcggggcatggtggcgtgcacctgtaaccccagctacttgggaggctaaggcaggagaatcacttgaacgcaggaggtagaggttgcagtgagccgagattgcaccactgcactccagccggggcaacagtgagactccatctttttttttttttaatgcatttataatagagatgtatctgtaaagtgctctcaggaaaagagctagtgacatgatggatagatgagcctgctgagagaaatggatgtggagctggggcttagcgaggccagagctatggagcatgagccagggtgattctccaccaccctaagaaggagggctgggtcctactgggtacatatattgacacagctgtcagtataggtacctagacaagaaagagactctactaaacctctacctatcagaaagtcctggccccaggctgccattcctgagggcacttgagatctgctgatcagggtcttcatatcttgtcaatgccttggctctaaggggtgtgaaggagagctgagaaatcatgctccctccagggcctatcttgtagggaagacaaaatcaatgtaggaagaacacgtccctgccaggaggggcaagcctgacatcccaactcctgagctctggagacagcgctgtttgaatatctggagccccagaccacagacaccactgcttagggagggttctctccctcaggccagaccagggcaaacactattcattgttatgactctgtccttgccagtagaacccagagaaagcagagagcctgcccccaaggaatgaaccatgtttgttcctaggcagccatgacaatcctgtttctctttgtaatactcaaattcccattctcccttgaagtgggaggagcatgtggctcagttctggccaacaggacttaaagggaagggtcctgggagggctctgggaaagcttttacttttcatgataaagtagggccgcctcaatgtcttcatggagctgtggcagccactttgtggtaaggagggaacaacatgccaaggatggaacagtgggaggatgaaaatctaggtccccgaggatccaacaaccatgacaccacctccggatttcttgtcaggttggggaaaaataaaccactctttgaggtcctttgattacttacagcagagtgcattcttgattgtgtgctttgagaggatgacagaggaactgttgtaaagggaagctctctgctgtgcagcacgcttgggtcccttttgcctttggggcttcgccattaattgcaaacctgttcccagtcttcacttctatccattcagcccgcaaacatctaccagttgctgtaaggtggcttaggcgactgcaggctgcatctagctgtcctgcgtcacctgttttctggctagcagcttagtgtccagattctgagctggagccagcttttaacccctttggcaacagtctgagctgaagagaaagccccactgggcatatacatggcaccacgactcttcccgggcaacgtggcagaacttgggctttgggccaacctcctagcacggcccagtgagcacctccagtctcatgcctcctctgggaaatctgtttactccagctttgcccccatcccccacccgggcctcacctcccgcacctgcaaagacacaagcaggccaaagaataccactcaagaggctttttccgttttatttctttgggaaaggaaaacaaaaagtctttccatcacatatggtagagatatatatttatatatatttatatataatttcttttgtggttggacgtcccaaagctgagtctgttcatatttttttctatttttttcttactaatgccttctcttctccctgcccctgtggcctaggcccaggttctagggcaggtacagtgaggggtgaatggaatgggcagtggtcgccaggatggcctcccacccagctcagagacctggtgaggaccacccagaagggctgtgcagagggttagaggccacacagaggggcactcatgtttttgtgggggatgcacagctcattaaacagtcaccagtcatgggaggaggctggtcaggggctaggggacttgctcacagtagttgccagctctctccaccttgccccccaaaactcagtcttgggggtgggaggaagagagtgaaaaagagagagatataagggctgagggccaagcctcctccaatttttattgctggtgaattagaaatttgcttttcccttcctgtcttggggagatagactctgagagggccccaagagaagcagctgacattggctgacctaacccctcatgccaggcctaccctgggcaggtgctgagccacctcagggcgccaggaacctctcaggtcagccttgttcttcaagggcaatcacatccaactctccccccgcccccaaaacaagggcctccggctcagacttgggccagtggagctgggaagtgggcagtgcaccaaaggtcaagcggaattttctattggaagaaaaggtgagactttggggaagagactgcctaggaagatgatgtgctgagcatgaaagcagaaagaggctgggggaatagagtgcgggaagacatcgcagacactcgtctgacctcagaaactgggcgaggagagtgcctgagaggcaggtagcacttaatagctgtgttagagccggacagtggtcctgggtgtggggtcagccaagcagatggggctgttgccctgcgggatcctggccagaagggtgagggtagagccgagaagccgtcaggcaacgcttcccaagaacaggaggacagatcttccctgggtgctggacttccagccccagtcctcccctcccgcaacacacacacagggacacacactcacaaccaggccaggctctgaggcctgagtccaagagatcttgttgggggaggggctgggcaggtagccctctcagccaaaggcaggccatctgctcccacttgtcctgccaatctgcccagggagggagagcactgtaggagggagagaggtctggagcccaggctctgtcagtttcagcaaacctggtgcaggccccctcaggctccatggcctaggaggtgagcacagagagcatcactagacacagggtggccaacagtagcagcccaggcctccagaaggactggggcaccttatggcactgcacgtctgctgcctccatctccaacaagggggtgccgagaaagggagcatgactcccccaccacctaggattgcccccactcaccctgccctcctcctattccctccttttaggggggtccaagtgggctgccacgggggcagtgctggagctaggagggcaggtggggagggaggaacctggtcacagctgcttagagaacctctttggtctggggttatggggtctatggggaagagagatggaggggaggggacactggggactctggccttttgacaggacatgtgtcaaaatgccgagtgcccaggtcgatcagatttctgtggactcaatgcgctcgaggcgggagggggtccaggccttcttctcctcgccatgctggggagtgggcgtgcttgcaccccctgcggccccgcgctcccgcagcctgcgctccagctgctggttgcgctggtacatctccacgtagctcagctgcagctgcttctggtactcgatcaccttctccttctcctccagccacacgcggcgctcctcggcgaagctggcaccctggcgctcccgggcccgccgctcagccgccagctcggcctgcagccgccccacctcccgccgcagggcccgcgtcccgctctccccgccagcctccgcctccccgtccacggaaaccaaggaggcggcagcggccaccccggcctgacggcgcatcttagcctcgtcgctctcgcaggtggccagagcatcctgtggctcggccgggtccacgggggtcagcgccggcttgaggcaggcggcaggcagctcgccttcgcccagctccaggctggcctgcttgctgctgaaggagtcccgcaggctgagcagctgctcctccttctcccgcagcgaagcccggccctcccgcagctgcgagcgcagtcccacgatctcactcaacttctgcgacacatccgcctgcgagtccttcagctgctgcttcaggagggagatctcgccagccttctggcacacctgggcaggaacaggtgagaggagaagccaggtaaaggcagagctctgctcaccccaacccagctaccagatctggagccaggggcaccaagcttcccggggctgcaggctcagcccctcatcagcagcgacgcacccgattccctgcctggactcaagatggacatgtctcacccagcggatggcctcgggtcctcacagacactcccaattgatttttgtcccccctgctcctttcatccccccccccatcccaccgttatgatagtgaggggcaactgctctggggtttcccagagggacagaagggaggcagaggggaggcccagatccccagcccgcacctcccacttagtttcctctatccggggcaggaagtcggcctgctccttctggcaggcggccaccttgtcctccagctcttcccgctgccgcatcagccgggccgcctcctcctgcagctgcttcttgtcctgctgcagccgcaacacctgcagctgtaggccctgctgggcgcgctgggcacgtcgggccacctgctgtagcttcccgctgcagccctgccgcagctcggccagctcccgctcccacgccttctgccgctcctccagtacctgggccacagccgcctcgctctgctccaggctgcgccgcagagctgccacctcctgctccttctcccacagccgctcctccagctcctggatgagtgcactgggggagggcggtgagcaggccgcgaaaggcaggcctccacctccgccctccccagagcccaggtggcctggccgccccatagatgacgacgacccactcttgctggaggcccgtccactatcggaggtccccaggtcctggtagcccgaccccccaccgctgctgccgccactaccactaccatagctggcagtgccaatgcggttaatgtggctggtggaggcactgaggggtgccaggtgctggctgtagctggagctgtaggtgggcaggcttgtgagggagttccggcctgagtctgagaggccactcccactcccacccgctggagtcatggtccgagacttgtccagtccgcctttgaggccaccagggccctgccgtccctcaggagtcccattggtctgcggggggcacaaattctgcatggagtggaaattcttgggtacgacaggcttgaaggccgacggccgaactagtggttctgagcactgcaggaaacgcaggagggggctgggggtcaggatgaggccttgggcttggcccaggctcttccctctggccaagacttgtccagccccacctcccacccctactggatttccaccctgaggttccccatccggggttctacctcatggctccctgataccagatctctgtccttgatctacccgctagacttggccccaggtccccagtccatgactccccagcccagcctccatcctgcccccacaacccaacctccaagaaggcccactttgccttcctctctgggttgcctcccacccccagaaaaaggctgtgagggtctcaggccctgcggactgacctggtctagcttgccagaggtggccaggagcttgggtgggtggctgggctcacgatactgcggtggggctttgtcactgccaccactgctgctgctgcctccgctgctgccaaccacgttgccacagacatcggtgtggtcactgccccgcagctcaccattgaggtagagggagttggcgagacccttgtcctctgaggggtagcggcccggcctctccctgctggccccactgccactgcctcgggggccagggaaactgccctggctgcccccaccccctgtgcgggtacccacgctcttcatggcaaactcctgggcatgggccaccccactgcccacgctgcccatggccaggcgggggtccgggggtccaagctcggagggccgtggggcaaaggccaggagaggatcccgccctgggtcagcgcgcacaggcagcgtctccagcttcgccatgactaagccaggggggcactgtgggcacaggtgggaaggcagagataggtaagaccctactcctattcccaccaccccagccaagtcaacccggcaccgctctgcccctcagtgtccccttccctacaatgggtacaaaaagttcccaggcatccaaggtgaaggaataaggctgggataaaagagagaacttgggaatgggggctgcctgttgcccacctgataaagcccaacccccagggctccatgcacatagcccccagcgttgctcagctcagctcagctcagctcagctcagcgttccattcctaaacttctgccttagccccacctccgccatgagcttcccaggctcagtgaccctctcaactctttgctgcaaccccagaattttggggttctttatcttgggtctgggaccctaatatcccaacctcatgggctggggaaatggggttggaaggggagagcagtacctgaatccaacagggaaccaacctcagaaattaggggagggagagaaatacacccctatccaaaaattgagggtgggggtccttcccagccccctaacctaagtgttgcagtcagggcagaagtggaagctcactaccagcgcaggcttctctccttgcctttccaaggggttgaggggccgacgggtcctcaagcctgggaccctccgaggcccggtctgcaggggccatgtgcctcactctcgcagtcggggctcggcccgaaccagctgcgcgactttggaggggccgactgagccatcccggactgcagttttctcctctgcgaaatgggaggaatgaaggacctaccttgcggggctgccgcgtgccaggcgccccgaggcggcgagcgcctgaggaaacgggggtctgggggagggtgggtaggcgacgcacatctgggtcgcgggtgggcgccgccaagggcacagcctgtccctcccggatggacgggggccgcggctgcagtaggtggcaggcctgccctccccaaggtcttcccagctcggccgcaccggggccctgggaagacagggcccccttcccgggatcagtcctccgcagaggtcccagggctggctgaggccggggcaggggacgcagtggcgccagctgctggcactgacggagcctctctcagggcctgcgtttcccacaggtgggaggggggaggggaggggaggggccgctgcagggtgcgcggccccaaggatcctgcgcctgccgaaccccgcaaagaattcactgccaccaggaagacttcccggattactaccctctcccgctccctgtggaccttgaccctgctcagcttaccgtgaagccctctgagtccttctgtgggtgcgcgtccccctcccccaaggccggcccacaagcgcagggggagccaggcctcgggttacctgtgctcagggaggccgtgcttcctcgttcctttgtctcaagttcgcacctgggaacacctgccccagagatctgcataatgcagccgggcaggagcaccaggcagtgtctgcctcgggttagaccctcaaataagtgtgtgggaaatgggagagggcgcccttcaggccttttcccactacaccctgcataaaccaggcagggagccctccttccctatcaagttaaggggcccacgtggcaccctatggccccacagaccgtcttctacccagatgcccagttctaatgctgagtccctggcccagaccaagggcacctgacaaaactgttgtccttcgggagtcttctggcccccacaccaggaatgagagctctaggttgttggaaagttcactaccaagcctgtccactgtctctgtagaattccattctcagcatctgtccccacaggtgtggagaagagcacttcgccaccctcctcccttggacccgtctgtccccataagcaagggccaggactaggatgaggacagagagccacgtagggcacaaatgaagggcacaaacagcaagtacacagccctgagggtgacagcctccttccctttgtgccttgggtccctctctggcctcactctagtccctgctctgcctctactccccagcatactccagccccctatgcctcagccctgcaaccccctcctaccttaagtatggacccttctcttgccacctctgggtgcaatgtggggagcagctggggactgggaggatgaagcctgaaaggcctgaggcttggaaccagtaggaaggcctgggcagggtttgggaaagaactggcaaaatttcatacagatgaggtcaggtggtggggacaagggataatgctggactgggcaccagcgtgcgtgtgacactgttaacatgatagggggagactgcttggggaaaatagttgctttgggaaacaccagaggaagatacctctcaagcactaaatggaggccaagcaaggtggctcatgcctgtaatcccagcactttgggaggtcaaggtgggcagattacttgaggccaagagttcaagaccatcctggccaaattggtggaaccccatctctactaaaaatacaaaaattagctgggtgcggtatgcattcctgtaatcccagctacttgggaggctgaggcacgagaacccccttgaacccaggaggcagaggttgcagtgagctgtaattgcaccactgcactccagcctgggtgacagagcgagactctttccttaaaaaaaaaaaaaaaaaaaaaaaaagcactagatggagagagattgagatcatcagttttcaagggtgctgggggtgtaggccagcactgagccagggagcaaagccccagaagtctggaaggcactctgggagcaggaagaaggccaggagaaggtgggccctgaaggccaagattggggggattcaagaatgtggggacagtttccagtgttaaaaataacagggccaggtaacactggggttggagagtgtgctgcggatttaggagctggtctcgagacatcaccaatgtctatgtcagaatggtttcagaaaagtggtacaagtgccggatgcggtggctcacacctgtaatgccagcactttgggaggccaaggcaggcaaatcacttgaggtcaggagttcgagaccagcctggccaacgtggtgaaaccccgtctctactaaaaatacaaaaaattagctgggcgtggtggtgcgcgcctgtaatcccctactcaggaggctgaggtgggagaatcactggaacccgggaggcagaagttgcagtaagccgagatcatgccactgcactccagcctggaagacagagcgagactacatcaaaaaaaaaaaaaaaaaaaacaggttggcgcggtggcttacgcttgtaatcctagcacttagggaggtccaagacaggtggatcccctaagatcaggagttcgagaccagcctgaccaacagggcgaaaccctgcctctactaaaaatacaaaaaaattagctgggtgtggtggtgcatgcctgtaatcccagctactcaggaggctgaggcgggagaatggcttgaacccaggaggtggaggttgcagtgagccaagatcgcaccactgcactccagcataggtgacagagcaagactccctctcaaacaaataaacaaaacagaacaaaaaaagtggtacaaaacaaaggcagtccacaaggctagaggagtgcagagaaagacatggcagagttcctgctaaaagagaagacagttatttaaggaggtttgagattcaagggcttttttaattttaaaattaaccatggtagaaacctgtgtgttaatatgctgagggaagttgccaatagtgagatgaaagatctaggcaaggggatagcaaggtgactgcaccagatacctggatctgggcaggaataaacctcaacagtgatcatgttgaccttgagtgacagggtataatgtttgggaaggtgctttgtaaactataaggggcaatacaaacatgtagtacaccttctctgagatccgggaaaggacaacctgagcataggttggggctggtcataggccactctcccctactgtttctctagagtgtgtgtagtccctagcaagtctcagatgcctcgagtcgtggatggaaacaaggtcccaggaccattgtcctgagcctcctttctccgtgctctacctggggaatgcttgactatcaacccacagaagctctctctggagcctcactgcctaaagagcttcttgtcgtaattgtaacctgtcatggttaaccccttgcaagcatgccctgccccttgtctctcccaagctttggctgctgcagcttctttccacaaaatcccagcagatagccgggcgtcgtggtgcgtgtctgtaatcccagctactcgggaggctgaggcatgagaatcgcttgaacccaggaggtggaggttgcagtgatattgcgccactgcactccagcagcctgggcaacggagtgagataccccctcaaaaaaaaaaaaaaaaaaatcccagcaggacaccggcaggacaaggaaggggatgtttccctggtaagcaggaactgaactgagaggaaaggtcacggtcctgaactagtccaggtaactgagcatggtctgcaaaggcagcctcctggcatcagtgcaccaccctgagatgacagcctgttgcctgactgcctcgatctctgtcacctcagccctcagtgcctggggcattatacacagtattagcgtcatgagggggccaaacggactctacctgacagttacatgtacaggtacctccaacccacccctcaacctgtgtctctcccaaagctaggaacacttggggtctcagaggccccaaccccagcccattctatctcctaaaaatctctagccagcccctccatccagcacccctgctgggggctcctcaatggactttcttctcctgcactccctcccccaggcagctgccaggggattccttctaaagggcaaagctgatcttgcccctgctctgtccaaatccttccatgagcaagaccaagtgcagtagacagagttctggcagcatcagctccaagtgtaaatcccagcttgactgattaggggtgcaacctcatgcaggttatttcacctcgggttctcacacctacattgcaggcattttaagaagtaaatgtatgatgggtgaaatgcctggtattcctcttggtccccagaaccagagcagagcttgcagcagggtccccaaggactctcctgatgcccctcctctatctaccctgacctgagcccctctctacttcacacacaagctcttgccagctctctgtgcccatcctacatgcttctagaccagttcaaaggctggcctcaggacagcatccctgatctccaccccccagagggggcatcttggagcacttggctgaggacaccccagggagatttcactctgaggcctccccagggctggcctataggtttcccaggagcacagagggcagagtcctgggggtctctgggccctgcaccaaggaaatgcagggcaaatgcctgtgggaatgctagttatgggcaatgcaaagaggcagtgaatccgggcagggagagcaggaggggtttccaggaagcaggactgagggaggaaagggatctgggggcactgcagggcttttggggtgcagagatatccagaacttcttggttgggatgagtgaggggagatccgtcttccctcggtggcctaagcactggcagcggaatgggcccatcacctagctactggctctgatgaagccagtgtttcaggactgagggggccgagagcgccccctccaccccgagcacacacacgcgcgcacacacgagcttctgctgggggtgggagggggggtcgccattcaccagcagcccacggcccgcagagccaactgatagagaccccagccacaggccacaggacctgggagtccctgcgatgggggaaaccccgcccgcacctccccaggctccccaccaacgcgtgtggccccggggggcggggcgcagagggaagaggtgacataatccgagccgcaccccctctggccgccacctccccccaggccgggcgaagcatccatgacatcatccgcctcctctccgctcccctcccccttgggaccctagcagcgggacgcgccccctacccagtccgggtcaggtcagacatgccgcgcagtgcagcaggcacggcggcaggtcggagccgggagggatgccacgatgggcctgcctcacttactcgctgcctcagggtccggcgcggggtctccgacacgggcgccaccggccccgcttgctggcgcagcccgaagcacgcccggcggggcgcgctgcgcgggcccggctccgctccgcgcccctcctgctccccgcccgagccccgcccaccagcggctgcggcaaacgcgagcccgccctccggccacgccccccagggcagccaatgcccgggctggggcggggtgaggcgccttaaccccttcgtcgctgcgccccgcccgcgcgtgggacccctcagcctcaccctctctagggcgcagcaagtccgccgcgagcccctctgctcatcgctcgttaccccccaggcccttgggcttgggctcaggcccagtcgttcctctgcaacaaatccaatggaaccgcgccctccctgaatcccacgtctaggaagaggaggaggagcccctcttgcttgggggaaggggctcccgactcggagccccgagccccattcctctcccgcgccagctcttcgggacgcggcctcccagcggacgccctgagaccttgcaagtccgctagggaggggtcgggacgagccgtcgcgggtggatccgcccggccgagcaacgacccgcccgggcgcgaggaccacgggctgtcgtgcgggaggcgtcgaggggcagtaaactccgttcgtgaccaaacggagacgatttgaaacttgctgctcacactggatcaccgtctggaaggtgcgacggggaaaaaatacacattacactccagcaggattgaacgctttcaccctgtgccccgcgcctggcgtaacgcgtggccccagaccacacgctgtaacccggggtgagagggagtgaggtgggacttcgtaccggacccggagcgccggcctcgcccgcgcgggcagcgttcactgtggggagtgctcactcagcctagggcggcccgggaggactgccgggaggagggagtcggccttgaattgaggcctcagccttgaatagggtagggaggcaagcctagccgagagtttagcactagcaaaagcctggaggcaccagggtctgccctaagaactgcagcgcctctgctctggctgggatttaacgcattacgtctctgctgtttataggtgttgtgtttggtcttacgacttcgtattctatagtttttatttattcctgttttctgaattttcccacatttgcttttatcttctatcgtgattttcaaggcagaaagtatttttaattcttctcgcggctgcctttagatttatcaaatgaaaatagtttacatttcacacattagtaaagtcagtgacaaataattcgtttttatattcccccatgagaaattttgtgtgcttttctgcctcctacctgccgccctcactacttatatttgtccacttaatcaggacgacagacctaacttttgtttacactttttttttaagccacaacattctttttcaatccttgtttttggcttttgccaactctgtttaattggtttcaatgttactgccggttttttgtgctctaatttttctattcctcatttggacccatctctcacatgactggtgatttcagggaggactctggaatgttgtatttcctaagcctttgccttaggtgagaatgcctttataatgatttcctgtttataggattcttgagtctcaagctttccccctcaaaactcttgtctttatttcattgtcttctggcactgaaaatgcaaagctgggtttgtctgtttaaggtcagcagtttgcttggtgcttgcaagggtttttctttaccctcaaaagtcaaacattttgccagtataaatcaatatgggccttatctattaattttccagaaacaaaagaggtcttctttgtagcttagaaaagttttcttcctgtccattctgtgaaaagatttgggtttttttctttcctctcctctaaaactatcacattggatcaccaatgtcaaataaatctgtttgttttctctgcaccctgggagactatatcaagtttttcttcaccattacggatttaattttcttcagagccaagagtactgtttattttctccaataagacatttgattctgcttgttttatttttctttcagccaatttccattccacctctgtcttgatctcaacttaatctctctttgtagtctccattcctatttcatagactaatgtggttttgcatctttaaaagaacaccaggaaaataagagaatactatctatatctgactctggtccaatgcatatgaaaacttttttgtttttttgagacagagtctcacttaaaatttacacaaactctagcatagtgtgtaactattgaatgaataactaatgcaatccccttcctttctttcagagcaactatgaactagactttttttttttttttttttttttttttttctgaaatggagtctccctctggaatgcaatggtgcaatctcagcccactgcaacgttcgcctcctgggttcaagcaattctcctgcctcagcctcctgagtagctgggattacaggcatgtgccaccaccacgccgggctaatttttgtatttttagtagagacggggtttcattatgttggtcaggctggtctcgaactcctgaccttgagatccgcccgcctcggcctcccaaagtgctgagattagactatttgtatctaggttcatcagttcagtgaactaatcaatactttgttttgttttgttttgttgttgcttaagatgatttgtcacctgctgattaatgatcacacaagttgtttttttttgagagagtcttgctctgtcacccaggctggagtgcagtggcatgatcttggctccctgcaacctccgcctcccgggtttaagtgcttcttttgcctcagtctcagtagctggcattacaggcgtgcaccattacacccagctaattttttgtatttttagtagagacagtgtttcgccatgttggccaggctggtctcgaattcctggcctcaagtgatccaccctcctccaccttccaaagtgctgggattacagaactgagccaccgtgcccggccctgaaaaccttgataaaggggctcattttctgggaaataaaattacaaggataacaaagatattaaaaacatcatccaagaaatatgtccaaaaaaggttctggtggccggcatcgttgctcacgcctataatctcaacactttaggaggccgaggcaggaggatggcttgagcccaggagttcaagaccagcctggacaacatagggagaccctgtctctacaaaaaaatttaaaaattgggctgggcatggtggcttacacctgtaatcccagcactttgggagaccaaggcaggtggatcacctgaagtcaggagtttgagaccagcctggccaacattagtgaaaccccatctttaccaaaaaatacaaaaattagccagttgtggtggtgaatgcctgtagtcccagctactcgggaagctgaggcaagagaatcacttgaacccaggaggtggaagttgcagtgagctgagattgcgctgttgcactccagcctgggcgacagagtgagaccctgtctcaaaaaaaaaaaaaaaaaaaaattaaaaaattagctaggcacagtggtgcacacctgtgatctcagctactcaggaggctgaggttggatgatggcttgggcctgggaggttcaggctgcaagtgggccgtgatcgtgctactgcactctagtctgggcagcagagcaagaccttgtctcaaaaataaataaatgaaattttaaaaaggctctggcctcagacagtttaatggaagaaatctctcaaactcactgaatagataattttcaccctactaatctgcatcagaacccagaaaagatagaatgctgtctatttcattttatgaagccacaattccccttataccaattcctaataatagcacaggaagaaaggaaaactgaaaaccatactcatcagtcatcagttccaggggtggaaaatcctacatacaattcaagaaaataaaactgtagattattctgtatgaaattaataagccatgagtttgtcaactgagaaaaaaaaacaattatcataatagatgccaaaaaaatcagtcaaaaatgaatacccaaaaagaaccctcctaattaaccaggaacagttgaaattaagaattatgtattaccggccaggcacggtggctcatgccttaatcccagcactttgggaggctgaggtgggtagatcacctgaagtcaggagtttgagaccagcctggccaatatggtgaagcctcatctctactaaaaatacaaaaattagctgggtggggtggcaagtgcctgtaatcccagcgactcaggaggctgaagcgggaggatcacctgaacttgggaggtcgtgactgcagtgaacagtcatcatgccactgcacaatgcagcctgggctacagagtgagttgccatctcaaaaaaaaaaaaaaaaaaaaaaaagccacgtgagatgtgagttcctgtttccctacagcctcaccagcataggatatcattagtcttttaaatatttgttttaatcacgtcttctttgccccatagctgacggaggggttcccactctcatgtgatggcagtggccaaacacaacacctgacactgggcaggtgagatttaccgcagtttattagttacaacatactcaatgggaaaggacaccacaagccacgcagggccacacagggggtgtactcaggagtggagagaacaaccaggggttgtggagggcaggctttgtagtgataagagagtgaggtgctccctggttcctgcatgggaggtaactggcttgtttgaataattctacaggctggcagggaactgaagcctactactaagagataagcaggaactgctcctggttcatttgatgaaaggattggctaggggaccttacccacagaacacagcaggagggcagcttacagctagaccatttgaggccctcttgattttaccagaagtcaagtcaatagttctttttattttttacatttttatttatttatttatttttgagacagagtctcactcttcttgcccaggctggagtgcagtggcgcgatcttgtctcactgcaacctccgcctcccgggttcaagtgattctactgcctcagcctcccgagtagctgggactacggcatttactagcatgtccagctaatttttgtagtttttgtagagacaagcttttgccatgttttccaggctggtctcaaactcctgagctcaagcgatccacctgagagctgagcactcccacagtgctgagattacaggtgtgagccactgcacctagcctcacatagcattttgagggtataaattggtacaaccttttgggaggacaatttggtagtatataaaaatatgaaatgtgtatatccttggacccagcaatctcatttcttgggaagagataccatcacaaataatatgatgtatgtctgaagacagtcactaatgtactgaatgtaaaagtaaaaaaaaaaaaaaaacctcctaaatacatcaatctattaatagaagattgattaaatgaattacaaggcatccaatgcaatgtaacaatagacagctattaatatttaaaaggacatggatgcctatgtgttgacacagaaagatgactacagtaagtgaaaaaagctgtggcatatcatatgtatacctatcaacctactgtactctaatttttctattattattttttatttattgagcagcccccaaagcagagagtcctcctactctttttttttttttctttttttgagatggagtcttactctgtcaccaagactggaatgcagtggcatgatcttggctcactgcaacctctgcctcccgggttcaagtgattttcctgcctcaacttcccgagtagctgggattataggtgcctgccaccatgcccagctaatttttattagaaatttttagtagaaacagggtttcaccatgttggccaggatggtctcgaactcctgacctcaggtgatctgcccgccttggcctcccaaagtgcctgggattaaagatgtgagccaccatgcccagcccctctattctttttcaaagaatatatatgtacgtgcatagaaaattcaggaaagatacatacaagattaaacatgggccaccttgagatggtgggatcataggtcatatggcagaagaaaggagtctaggcactaatgtaatttttgcactttggcacaatcagctcactgcagcctcgaattcctagactcaagtgatcctcctgcctgcctcagtctcctgaggaggcaggactacaggcatgcccagcttccttttaaaaatttttttgtagagaaggggtcttgctaagttgcccaggccggtcatgaattcctgacctcaagcaatcctcctgcctctgcctcccaaagtgctgagataacagatgtgagccaccacagctgggcaaatatttaatatcttaatactttgctatttctacattttcagagcttacctgtttattcgtccacataaacttattttcctttttgactgtctttaaaaatatatttaaaatataaatttaaaaaatcgtatctcttaatactctagagtaagcagaataatgccccccacccaaaatgtccaaatcctaattcccagaacctgtgaatatgttgttacatggccaagcgaaattaaggttgtagatagagttaaggctttgatcagcagaccttaaaataggaagattagcctggattatccaggcaggcccagtgtcatcacaagcgttcttaaaagtgaaagaggacggcagaaagagtgagatggagatgtgactaggaaagaatgatcagagagatgcaacataactggctttgcagatggaagaagggggccatgagccaagaaatgtgggtggcctctagctggaaaagaacctccagaaagggagcacagtccttccttgaaagggagcacagtccttccttgattttagcacagaagacccgcactggacttctatgctacagaagcagaagataataagtttgtgtagttttttgccactaagattcggtcatttgttacagcagcactagaaaatgaatacaaatacataatagacacaacattccttagttgaatgatgaatgaaatcacaaaaaccctaggtctacagataaataggtaaaagaaatatatcacttagggccgggtacggtggctcacgcttacaatcccagcactttgggaggccgaggcaggtggattacctgaagtcagaagttcgagaccaggctggccaacatggcaaaaccccgtctctactaaaaatacaaaaattagccaggcgtggtggcacgtgcctataatcccagctacttgggaggctgaggcaggagaaccacttgaacccgggaggtggaggttgtagtgagccaagatgccactccactccagcctgggtgacagagcgagactctgtcgcaaaaaaacagatagatagacagatagatagacagatagatagatagatagatagatagatagatagatagatagatagatttttttatatatctatatatatatatatcactatgaatccagatagccaataagtagttgaaaacatctatatcctcgctgatactgaagagatgcagatcaaaacctatcaaattaggaaagactattgcaatcctttggggtcctacccaccaagttgtccagaaggggatctgggtttacctctctgagatgactgcttgcagttacctctgaacagcaaattagggggcagacaaggcactttaattcatgctaaagttcgaatgtttgtactaaagccttttatagctatgcttactttatgaggaaatgaaaacttctggaattgggccaaaaattcctgggaattaccagtaaaggtcttgggggttatctaaaccaatataaaagtaactgaaatgattataatccaagaatgctggggtcttttattaccgtttgataagctgatgtgttttttgtttgtttgtttttttgagacagagtgtcaccctgtcacccaggctgaagtgcagcggcacgatctcggctcactgcaacctctgcctcttgggttcaagtgattctcccgcctcagcctcccgagtagctgggattacaggcaccccccaccatgcctggctaacttttgtatttttgtagagatggggtttcaccatgttggccaggctggtcttaaactcctgacctcaggtgatccacccaccttggcctcccaaagtgctgggattacaggcatgagccaccgcacccagccgagctgatgtttatacacacacacacacacatggtccatgaaaaataaaatttaaggctgagtgtggtggctcatgcctataatcccagcactttgggaggctgaggcgggtggatcacctgaggccaggagtttgagaccaggctggccaacatggtgaaaccccgtctctactaaaaaaaaaaatacaaaaattagccaggcgtggtggcaggcgcctgtaatcccagctactcgggaggctgaggcgggagaatcacttgaacccaggaggcagaggttgcagtaagctgagatcgtgccattgcactccagcctgagagacagagtgagactccatctcaaaaaatgaaaaataaataaataaataaatataaaagttaaaggaaaaatatacaaaaaattaaaaactgtattctctttcttaaaactattctttactaattgcacattttacctaagatagaaaatggtttatgtttttcctgtgttccacagggtccccctgtaacatctgattctgtttttatataattgatgcattgtttatatgatactaagggactcatctgtacctataccctgtaagcctcatttcaagatatttagatacaaagcgaaaaggaacacaagtcaccacttcaagtgagtgcctctgcatcatacatgtacatgtgaaacatgtaggtcctttttttttttttggttagatggggtctcactctgttgcccaggctggagtacagtggcgcaatcacggctcactgcaacctccacctcccaggctcaagtgattctcccacctcagcttcctgtagctgggactacaggtgcacaccaccacgcctggctaatttcttttttttggtatagatggggtttcaccatgttgcccaggctgatcttaaactctggggctcaagtgatccacctgcctcggcctcccaaagtgctgggattataggcatgagccactgtgcctgaggcgggaggatcatgctgaaactccatctctacaaaaatacaaaaattggtcgggcgtggtggctcacacctgtaatcccagcactttcggaggctgagacgggaggatcacttgaggtcgtgagttcgagaccagcatgaccaacatggtgaaaccatgtctctattgaaaatacaaaaaaattagccaggcatagtggcacacgcctgtaatcccagctacttgggaggctgaggcaggagaatcacttgaatccaggaggtgaacgttgcagtgagctgagatcacgccattgcactccagcctgggcaacaaaagcgagactctgtctcaaaaaaaaaaaaaaccccacaaaaattagccaggcatgatggcaggtgcctgtaatcccagctactcgggacactgaggcagaagaattgcttgaacccaggaggtggaggttgcagcgagccgagatggcaccactgtccagcctaggtgacagagcgaaagtccatctcaaaaaaaaaaaaaaaaaaaaagacaactgcccaactagacggcaagcacatgtccgcacaactacactattatgtgaacaacacagggaaccgtggagtttagctcaacaaggtgacttgacttaccttgctgagaaacagctaaagggaaatctcttacagcaattgaggaattaagtctcagttactcagttctgaacagttagaacattaagagttttagttttattatattatagatgtgtttttgtgtcatatggtagaaatgtaaatagtaaatgtaaaatagaaagttaaaatgactaaaaaaccagtcagcgtaaatctaccaagctatacgcaaaaggttatatttaaataagtttaatgttacagtattggtatttggtaggttttcttataaggttcccttatccattttgctgtaattaacaatcggataatgtattagccagccaaaaattatgtatgctgtcaggataaatcaagtcaaaatgtttttcaatgtcactacagaaattgtttttggttcaactatatgactatcaaaggttatgtacaacgcacaactctacccagatactcatccttgcactgttctaaataaaggaaacaagactcttcagtactctgtttttcaaactgtaggtcaagatctgttagtgagttgtaaaatcaatttagtcaccattggcaataaaatagaatagagaggcaagtatcaacatgcatcaaaccaaaaggattgtactgtgaaacgcctgcttcatggatctatatgcatacatgcacacataagaaaatggatttcttactaagagatactgttaaaagagtctgaaaacacagccttagtggaatagctgtctctaatcttggggctgaggcatgcacgcatgaagacttgagggatattctcaaatagtccagtggcttgtggagggagaagttgatggtataatgacaatttgtgggataaagtgatgtaaaggtttaagaaatgagttaacagattcaaaacactaagtaaataaacattcccacttcttccccacccagacttaacaaacatagctcagatctctgggctcagaccttcccagccaggtcccagcctccttttccagctttgtctctcatttgccctggcctttcctccacccaacactccatgctcccctcagggaaccacaggccttattctccactccagatctctgcacctgtcctccttctagcctggaaggcctctcctattatccactggtccctttcatacactccagcatctggctgtgcacttgctagcttgtgattgattggtctctctgtcagattaataccactgcactggccgggcgcggtggctcaagcctgtaatcccagcacttagggaggccaaggcgggtggatcatgaggtcaggagatcaagaccatcctggctaacacggtgaaaccccgtctctactaaaaatacaaaaatattagccgggcgtggtggcggacgcctgtggtcccagctactcgggaggctgaggcaggagaatggcgtgaacccaggaggcggagctttcagtgagctgagattgcaccactgcactccagcctgggcgacagagcgagactctgtctcaaagaaaaaaaaaaataccactgcactaacccctacttgtggctggggccatgttttgctcactgtacttccctagggtgttcaaaatcatgccttgtactcagtaagctccccataaattacgttattttttaacaacatatttcagatgtgtttaaatacttttctgttacaaagattcaatacaggctgggtgcagtggtacacggctataatcccagtgctttgcgaggccaaggtaggaggatcacttgagcccaggagttcgagactaccatgagcaacatagtgagatcccgtctctaccaaaaagagaaaaaatatatatatatattagctgggcatggtggagtgctcctgtagtcctagctactagaaaggctgaggtgggaggatcacttgagcccagaagtttgaggcagcagtgagccatgatcacaccactgtactccagcctgggcaagagtgagactctgtctcaaaaaacaaaaatccaacatgcatccagtatcagtatcactgtggtagcctgggggaatcactgaactgccaccatattaccggtggcttcacataacccagctactttagctccacataacccagctattttagctccttttcttgaggtttagcatgagccaaggatacacaaggccatctaggactctttatgttttgttatagaaaagtttaaacatgtaggaaaatagatggctgggtgcagtggctcatgcctgtaatcccaacactttgggaggccaagataggtggattgcttgagctcatgagttcgagaccagcctaggcaacatggcaaaaccccatctctacaaaaagttaaaaaattagccgggcatggtggtgcacacctgtaagtcccagctactcaggaggctgaggtgagaggatggcttgagcctgggaggcagaggtgcagtgacctgacatcgtgccactgtactccagcctgggcaacagagctagatcttatcctaaaaacaaaaacaaggccaggcgcggtggctcatgcctgtaatcccagcactttgggaggccgaggcgggtggatcatgaggtcaggagattgagaccatcctggctaacacagtgacaccgcgtctctactaaaaatataaaaaattagccgagcgtggtggtgggcgcctgtagtcccagctacgcagaagactgaggcaggagaatggcatgaacttgggagacggagcttgcagtgagccgagatcacgccactgcactccagcctgggcaacagagcaagactctgtctcaaaaaaacaaacaaaaaaaccagaaagaagaaagaaaatgagcacaacctccatgtacccattcccagtttttcagtaattttcagctcatggttaatcttgtaaataactattttttgaaaaattgtgtaatataactccaatctagaacttgtcaataataagccttgaagatccacaagaaagagaagttactggactctatagggcgcaagtagtatcacaatagacctgtgtagggctgggctgtgaagataaggcacccaggacaagcactgcttgagagttacaaaaatcaaaatgtatctgattggttggagccaagagtcaagggttccaaaatctaactatgaaaaagggaccaccaggctgggcacggtggctcgtgcctgtagtcccagcactttgggaggccaacatggtgaaaccccgtctctactaaaaatacaaaaattagccgggcatggtggcatgtgcctgtagtcccagctacttggaaggctgaggcagaatcgcttgaaccctggaggcggaggttgcagtgagctgagatcgcgccactgcactccagcttgagtgacagagtgagactgtctcaaaaaaataacaatactaataaaaaaagaaaagaaaaagggactacccaacaagtaaaagactcaggtagaattccaatgaagttggctgggcgtggtggctcatggctgtaatcccagcactttaggaggccaaggcgggtggatcatgaggtcaggagttcaagaccagcctggccaacatagtgaaaccccatctctactaaaaatacaaaaaattagcagggcgtggtggtgggcacatgtaatcccagctacttgggaggctgaggcaggagaatcgcttgaacccgggaggtggaggttgcagtgagccgagatcacgccattgcattccagcctgggcgacagtgcgaggctgtctcaaaaaaataaaaataaaataaataaaaattggccgggcgcggtggctcacacctgtaatcccagcactttgggaggcagaggcgggcagatcacgaggtcaggagatcgagaccatcctggctaacacagtgaaaccccgtctctactaaaaatacaaaaaattagccaggtgtggtggcgggcgcctgtagtcccagctacttgggaggctgaggcaggagaatggcgtgaacctgggaggcggagcttgcagtgagccaagattgtgccactgcactccagcctgggtgacagagcaagactccatctcaaaaaaaataaataaaaaataaataaataaataagtaaaaatgaaaaagaattacaatgaagtcttgagtccttggttctgaatcatcatccatcagtcatagctatgtcctcagctatcacggtaaccctggcgctccagagtaagtgaaaactaccctcagacaaaaataaaaattaaaggccaggtgtaggggttcacgcttataatcccagcactttgggaggccaaggtgggcggatcacctgaggtcaggagtttgagaccaacctggcaaccatggcaaaatcctgtctctactaaaaatacaaaaaattagccaggcatggtggagggcgccagtaattccagctattcaggaggctgaggcaggagaatcacttgaactcgggaagtggaggtttcagtgagctgagattgcgccactgcacccctgcctgggcgacagagcgagattccctctctaaataagtgaatcaataaaatttaattagagctagcaaggctgggcacagtggctcatgcctgtaatgcagcactttgggaggctgaggcggggggatcacttgaagtcaggagtttgagaccagcctgcccaacatggcgaaaccccgtctctagtaaaaatacaaaaattagccaggtgtggtggcgcatgcctctaatcccagctatttgggaggatgaggcaggagaatcactgaacgtgggaggtggaggttgcagtgagccaagattgcgccagtgcacttctgcctaggtgacagtgagactccaactcaagaaaaaaaaaaaagtagagcttgtgaagtgtttatgatcagttttagtgtcacatgtacagatcagtaatgtaatcattataatactatgtctggtctacggctgggcgcggtggctcacgcttgtaatcccagcactttgggaggctgaggcaggcagattgcctgaggtcaggagttcgagatcagcctggccaacaaagtgaaaccccgtctctactaaaaatacaaaaattagctgggagtggtggcacgctcctgtaatctcagctactcgggaggctgaggcaggagaatcgcttgaacctgggtggtggaggttgtagtaagccgagatcactacagcctgggcaacagagcgagactgcctcaaaaaaaaaaaaaagcattaaatttcattttattttcatttttccctttattttttcattttttagttgtgaaagtagttcgtatatatttagaaaaatgtttacttttaataaactattcatttaataaatgtattaactgagcactaaataatgctcaaaggatcatagatttttttcctccacactaagcccatgggacatgaagaatatctgggtgcttccaggatataaggaaggaatgtgccttttcccactcctggcctttgggtactgtcctgagcatgggatgctggggcaggggctgccttggccatcttgccatctgcatggcagtggcagaggatagctgagggaaaggactagagagccctggagctgccgccttgctctgtgagaagccccttccaatggagatttgaattacttgcaacttgttggcctgcctctccaccccacccccatctgttccctagctctcaactttggctgcacactggaatctcctactcatgctccctgactatgccctcacagattctgatttgactggtcctgggtgcaacggggctggcatgagacgactaaaaactccccaggtgaatccaatgagcaaccaggctaaggaccagtgatctaactgtaagtcattctcttcttttccctttgtaattttatgtttccacctcatactgtggttggctacatctgtttcttccctctcctactagaatgtaggctccagatggccttccaaacaatacatgtggcccttcacgctccaggtgatgacaagtacccgttgctgatggaagtagcagagtcatacctttcttggaatttaggttctacagtcaatgcttatggcacccaatgagtcaaaaacacccttggcaactcctaaggaaggctctgccctggaacctgatgtactgtttccccatcaccatccagggagagtttcctcctgggccggaacagaaagctgcctcctccatcaggcaccagaggaagtagggggcttctgtttagggaccactttgcataaatacacatttaaacatgtgcctcaccctcagcacagcaggatgctcacgccatgaacagccaacaggaaccagagtgaccgaccctccaggaggtacacacctccctcccatcccacccacttctgagcatatggttctcacatccaccagtgggtggaatcacccacaccatttaaactttttgtcaaggatgtagagctgaattcatgtgatttcccacatgagcaatgtccctccctccactgcacaattatagccagctcaagcaggtcctctccttccttctacctgccctgcaaatggctctctccttcactgaccccccgccctccttcttaaaggctgatgctccctaggactctatccttgatgcttctcattaattcttctccccgctggctctcagccctacttagggctcctgatcagttaaaaaagacccatgagacctcccctccccagttaacagagatgtggcccaagaggctccccacttctaatttgagtgggggcaaaagaagagaaagatcttatctaggtcttgggggcagggcttgcagggcacaaagaaacagagtaaatgtgcaacaggctattttcttgaatgaatggattcataataagaacaggacttcaccagcttccaagggaccctccccacctctcggatatattctgaagcctaaatttcacctgcttatctaggatcctaggccaggccttctgccacaccaagccacaccaagctcagcagtactcacaggcctttaatctataactgcctggccacaccatcacttccccaggatggtggggagggatgaagatgtatagccaggtaggccacaccaactctgagtccaagagggaaggactggggtcaggctggggcttgggcaggggactcccggccccaggcgatgagggagttgctggcttgggcaagctcggcgatggacacccggccccgctgtcggatgaagttggccacggcggccagttcctctggggttatgtagatgaacttgccccggtcgtcaatcacacctgtggggacatgcaggttgtggggctgaggcctcctgggcgttccccatctggcctgagaatgcccacctactccttcacagctggctcagggcccttccggcctcctgcctgcctggactttcctggctgcatccagtcctgctaggagagtcgaatcaggctgccctgcctgtcctctcccactgctgccacctccaggccctggcatgtcctccttgtaactgcatccagctactcagtgcccctccttgcacacccctccccccatcttgggtggtcatcctgcctctgcagcacatccctgcagcccctgtggctagacactctccaaggccaggactgcagtgattggctctcatcatctcacctgttatagtcccctcagccagcaggtcctggatgcgatttatggtgtcctatgaggagaacaactctcagaatagagataggcaccaatgtccccagaaaaagcactgaaacctccctcccactacagccaaatctctttatttccctctcatgccacgcccaaatgtgactctgtgctttgcctttggaagggccctgggtagaaggggctctggtcctgggccctgcaagacccccaaaagagtatctcttcctgttagaagcggggcagtgatgtttgcaacacaggctggtgcagtctgtgcatgagagttgtcaaggtaactgatttgggctgctttggtcacaggggctggcagagtgatggggtttgggttttttttttctttcctgcctgttcgtccattaaaaatgcaggattcccagggtgccaggagacttctgtgcactactcactcttggttggggacaaggtagacggtgcatcaagactctatctttagggcaggtcctctctgctagccacagacccctggccacactgcacacagcaggccacgttccagggcttacctgagtgcgtaggcccacctgggaagccaggtcttccaagagcacaaccttggactgctacaaaaagaaggaggaaaagaaagagaggctgagcttgggcaaatccctctaagcatgggcaccctccaggtttgcattctgatctgatctgttctcggtggctggaaaaacactgtacacactcctgtaggacagccttgctcccctgacacacacacacacacacacacacacactcactatcacccattgacagagacccgcacaatcataaaccctctcattccccttcttgcgaggaaggaatctacccaaaacaaccacctgcctcatgggccctgtcctggactccgagacacacgagtggtaatcagagcacagcagccaccatcctctgcatccagccatctctttttaacatcatggacaagttcaaggggacgcaccatagggaggaaggaggcggtgagagtcaccaaaagctattttaaataactgtcaccaggacttatgcttgctgaggacctactagaacaaggccctgagaaggtaggagggacacatgctgaacaagccatagtccccgccctggagctcgcagtccggctggtgagacaggtgagtacatggacaagagggagagcagataaaagcccgagcaagccaaggtctctcagtagaggctgtgggggcccactcctgccttgccttcgctggccgccccactggcctggtcccccacaacctgacacacccacactttttatccatcctctttataccatctgaggcactgagcccacccttgaaatcactgtcactaataccgctgagtgctttccagcacagccacgttctgtgctccaagtgcttcttcataccctcagtagaaacctgagttcccaagggcgcagcgaagggtccaccgctgtgtccacacaggcacctgcccccactaccccaacacacagcacaggacttgagaaaaggcagttcttttgcatttctgtgaatcctccaccgcaaatgagctgggggaggactgacatggtgacacctccctgactgcagatagcatgtgacttgtttgaaatgccaaagccgtatgtacaagcaagaaggcaagcgagaggcagctgggtcaggatgggcaaggacaaagtgacgtggtcagctggtctctacctacaaaacagggatcaggcagcgggctctcagtgacagtgtggtgcgagaacatgaagtcaccccaggtgctccctgatgacctggcctgaggtgctgctggggccaaaacacgtttgataaaacaagctaggtgtggtggcacccacctgcaatctcagctactcaggaggcagaggcaggaagatcgcctgagcccagccatggtcagacaggagaatggaacaagatcgagtgaaccctacacctctcataaacgatgctgggtgcaggcatgttcctccagttctgaaatcttaaggcaaaaaaggtctatccccttggagcaaggaggaaagcagacagactgaatttcagaagtcctccttttccttgcaagacagcagctctagaagaattagccagcacaggctggaaaaactttttttcttttttttttgagacagagtctcactctgtcgcccaggctggagtgcagtggcaccatcttgcctcactgcaacctccacctcctgggttcaagtgattctcctgcctcagcctcctgagtagctgggactacaggtgtgcaccaccatgcctggctaatttttgtatttttagcagagatggggtttcagcatgttgcccaggctagtctcaaactcctgacctcaagtgatctgcccgcctcggcctctcaaagtgctgggattgcaggcgtgagccaccatgcccggacaagctggaaaaacttctaagctccaaaagagtttggagaactcccagagaatagttacctccagggagccaccaaaagtgagggctagaactggggacctttcttctggtttctgcagagtaaagggggatgttgaagctgaccccctcctctaattccacctgggaaggcttcctggggaggggcttcaggaccatcttactgcctactgggtaggtggggacaagttccaaacagcagcaggcaagtgtgagaaataacctgcccggccacagcccctaatcaagtgtgccagggtagagagagggctccatgagaggggagtgcacacagcctgaacagacaggaccctctcaaagctgccagcatttcccccacttaagaaccccagactcaaggctgtgagcccagcccctcgctgctggcaggcgtctaaaccctgctctctttcaggagaggtggcgggaggattatgcaagccctgggtccttggcagcccctggtagcacccccaccaccgcccccgctccctctgcactccttccctcagccgcctctgcacctctgagttgcacttgaaaacctctcccctcatggcatccttcgtgggagagaagttgcttagcagcaaagcaaagtaggatgtgcttatgcaacctggagcagcatcgaggcggcctgcgcagtggctgcggacagaaggggacacactgccgccccaccctaaactccaaaggaaacaccatcctgttccccctgaaagacccaagttcccagtcaggagcacatggcagaggatgcttgtttcaactcagtggagcctcagtgtgacagaactgacagaaaacacatgtgaagagacttgaaaacacactgactcactgagcgtggggtctgaagagcagggaaactgtcaaactgagtgtgaggaagtgatcaaaggcttgcgcctcccacacagacccaggtccttctccaccttcggggttggagggagagaaactctcctggccaggaccctgcggctctgcccctctgggcccccctgtccactcctgcatgagcctgaatgccctgcctgcagcccccgctggaggcatccaacctgcacatgccaggcagggagctgacactcaggctctgttcagtggcttcttaccttgatgtagttgatgaactctgtcaggaagctctgggactagagaagcagagaaatcagggtgagcaccccctagcaagcccacagggttctgtacccattcacccaagtaccacctgctcacttgagggccacctgcctgcagcctgcctttggcccgcccaaccacctgcacataccgcttgcctacacaagcagcagagccttccagggtgagagtttcggaggcaccagcctctgctgaggacaaggcctctggccactaaagcctgctggtactgatgcccacccacctctcactgcctggccaggggcgtctgggatggggtggctagccttgcgtctggcacaggctgcactgatgggtgcagagaggggcttcccaggggcagcaggcccacctgttcctcagtcatggtctctcctacgccttcctcctccaccacaaaggcctccttcagtttcaggtactcctcatgctcccgctgggcctgctcctcgcgggccttcctctcctcctcctcctgtggacataggaggcaaaagtcaggtatcgggggcagaacagggcaggcacctgttctggttgctgctacccctgcaggacaccagagcatatagcccagccttttctcagagacagagctccttcaggacccccatttctccattcccccaagctgaaccatgggccgaggcccctcttgtcatcggtttcatcatcacctggacaaatgctgctcagccccttctcccgccctccgtgctcaggggatcttagcaaaaatctgttgaaaaccctgccatgaccccactctacaataccctccaatcacctgccccatcctctccttgtgtaactcaccaagcataccccgtcatgtccacacctcataagcaaatgtgaaccctgcatttcctcaccacccactcacccagtcagcccactccagtctggcttctgtgttcccagttctatgaaacaactcctgccacagtctcacccatgccctccactcaccaaactcaaggtacaaccttcaggtctcatatgtctgtcctctcagtgatccttctttcctcccttggcttccagatcccaccctctcctggatttcctcctgctccttgggccattcttcccgcctccttcatcattcagccctgcctcttctctctcctccacattctctgggccacctcgcccatgcccaaagcatcaaccccttccttgccagtgactaccacacttgtagccccacccgaatctcttctcccaaacacacaacggtccatgtgacacagctactgggccatctcacaggcagcagacagaccctgggacctactcttctacgtttagacctcctcctaggtccctggctctgtgaattaacacagccaactggtcagaaatgaggtcctattgaccccttctttctctaacttccagaaaactccctggtctgtctatgttgctccatcaccactactgcctggtaaaacagcctccctcaacccaacacattttccagagcactcagaaaaatttttaaatggaaagctagccgggcgtggtggctcacgcctgtaatcccagcactttgggaggccaaggcgggcggatcacgaggtcaggagatcgagaccatcctggctaacacggtgaaaccctgtctccactaaaaatacaaaaaaaaaattagccgggcgtggtggtgggcgcctgtagtcccagctactcgggaggctgaggcaggagaatggcgtgaacctgggaggcagagcttgcagtgagccgagactgtgccactgcactccagcctgggggacagagcgagactccatctcaaaaacaaaaacaagaatcagaaagctaaagctgaggcaagtaatatacaagatgagtctggggcatcttgcagtgccagaaactaagtgctcaaaaaacaaaacgagtgtgtgttaaaggtacacaggagccaactgaaagggctcccaatggtcaaagctggaacaatctcaacaacgtaataaataacgttactggattataacacaaagtacaaaataaatactcatgagtctatacaaatataaaaaaaatggctggtcgggcacggtggctcacgctggtaatcccaccactttgggaggctgaggcaggcggatcacctgaggtcaggagttcaagaccatcctggccaacatggtgaaacctcgtctctactaaaaatacaaaaattagctgggtgtggtggcgggtgcctgtaatcccagctactcgagaggctgaggcagcagaatcgcttgaacctgggaagcggaggttgcagtgagcccagattgcgccactggactccagcctggatgacagagtgagactccatctcagaaaaaaaaaaaaaaaaaaaaaagactgcatgaatatttaatgaatagggaaggagagacatatctcctgtaagagatttccatataatttatgtaagaactctaactccccaacccttaagtgtgggctgtgcacagtgacttctttccaaagaaatacgggaagaggggaaaaaaacagtcacattacagtggagaaagctggcaaacaaaaccgcagccaggcgaccaaggttaacaacattagggacaagtgaagcggataacttgcatatttggtatgttgcattgaagatggaacttcacttattgtcttcttcagtcagatccataaccccagtctaaccatgagaaaaacatcaaccaaactcaaattaagggaccttctacaaactacttgcccaggactcctcaaaattgttaaggctggacacagtggctcacacatgtaatcccagcactttgggaggctgaggtgggtggatcacctgaagtcaagagttcaagaccagcctggccaatacggtgaaaccccgcctctaccaaaaatacaaaaattagccaggtgtggtggtgcacgtctgtcatcctagctgcttgggaggctgaagcaggagaatcatttgaaatctgaaggtggaggttgcagtgagctatcgcgccactgcactccagccttgagagcaagactgtatctcaaaaaaaaaaaaaaaaaaggttaagatcatcaaaagcaaggagtcttagctgggcacagtggtgcacacctgtagccccagctactagggaggctgaggcaggaggattgcttgagcccaagagtttgaaggtgcagtgagcactccagcctgggtgagagtgagactccatctctcttaaaaaaaaaaaaaaaaaaaaaaaaaggccgggcacagtggctcatgcctgtaatcccagcactttgggaagccaaggcaggaggatcacaaggtcaagagattgagaccatactggccaacatggtgaaaccctctctctactaaaaatataaaaattagctgagcgtggtggtgcacctgtagtcccacctactcgggagaatgaggcaggagagtcacttgaacccaagaggcagaggttgcagtgagccgagatcgtgccactgcactccagcctggagacagagagggactctgtctcaaaaaaaaaaaaaaaaagcctggtgcagtggctcacgcctgtaatcccagcgcttcgggaggctgaggtgggtggatcacctgaggtcgggagttcgagaccagcctgaccaacatagagaaaccccgtctctactaaaaatacaaaattagccgggcgtggtggcacatgcctgtaatcccagctacttgggaggctgaggcagcagaattgcttgaacccaggaggtggaggttgtggtgagccaagatgatgccactgcactccagcctaggcaacaagagtggaactccgtttcaaaaaaaaaaaaaaaaaaacaaaacagaaattctgataaactgtcatgacacagaagagcctaaggagacatgaccactaaatgtaacatggcatcctagatgggaccctggaaaagaaaaaggatactgggaaaaaacaaataaaatatgaataatggggtcaggtgtggtggctcacacctgtaatcccagcactttgggaggccaagggaagagaattgcttgagtctaggaattcaaaagcagcctgggaaacacggtgaaacccaatctctaccaaaaaaaaaaaaaaaaaattagccaggcatggtggtgcacacctatagtcccagctactcgcagggacggggaactgaagtgggaggattgcttgaggctgggaggcagaggttgcagtgagccaagatcgtgccattgcactccagcctgggcaacggagcaagaccctgtcttaatcaatcaataaagaaaaatctgaataatgttagagtttagttaacaataatgtgtcaatattagttgtgaggaaggtattaaagtgaggtaggacgttaaggataagggaaactggttacaggggagaagagccaggatatttaaggtacattaagcgggaccaatattcagaaaggaaaaaaccctctctgctaatgcctcccccatgctgtattctggcttatcagccacagcacccacatccaggcttcctgccatccaggatcctgggacaacaggtcagtcagaggtcacaggtcttcccagctagggcagccctggctctaaccctatgtaccccacatctttatggtgttctctttttgggaaacctggttctcagaacaaagaaagcatctggcaaacaaatgttcattagtcactactgcagtggaccccattccctgagcaccttctgtatgccaggccctcgatgtaagaaccatctcttacaatgatcttcctcagcctcaaggccttcaggatccagacccccatcacctctctgccatcttctcctcctctcctggctttctctgcccagctatcctcctcgcctcgcgttcctcacatgctccccgaaagttcaatagtcacgtgcacaaaaatccccactccaggctctgcttttcagcagtggcttttctaggctgtggtggagcctagggaccaaataaaccaggacctgcccttgtgccaggtctatggcccaccttctaggttggaggtgccagggagctgcataagaagcaaggctgccttgcctggtcaagggtcagaggtcagggtaggggctggcctcaccttctgctcctcctccaggcgaagccgctcctcctccttcttccactcagcttcgcgctgggactcgagtcgtttccgctcctcacgttcagcctcctctgcctggagagaggtcttcataggggcacatccctcacccccggctagagtgtgcccaccgcccagacagactagggaaggcaatgcctgggccagggcacagacccaggcggcaggagacagagccagggaagcagcaaacaccagcccagcaggcaacaagccctcagtctgccttagggaaaaaggaaggcagtgccctttcgcacttcccagagctgcaccccatccctccggcttgcctcacgctgggcctttcgcgcttgtttctcctccagcttccgcagtttcttagctccaattttccccgacaggtgagtttccgctggcttctcgacaccttcctcctcctgggctgggtatggtcaaagaaagacagttcaggttctgaccagagaggactgatgacgatggatccccaacccctcgtccctcccctaacagggggatccccttccacccacctgcaaatgtcactagcccagctctgccctccagaggcatctgccatgagtgcgtgtgtgtgtgtgcatgaatatgtagggatgggagaacggtgaggggcccatagggcaagggaaaagatgagaactttaggccgggcacggtggctgaagcctgtaatcccagcactttgggaggccgaggtgggtggatcacaaggtcaggagattgagaccatcctggcaatcatggtgaaaccccatctctactaaaagtacaaaaaagggctgggcacggtggctcatgcctgtaatcccagaactttgggaggcaaaggtgggcggatcacgaggttaggagatcgagatcatcctggctaacatggtgaaacctcatctctactaaaaatacaaaaaattagctgggtgtggtggcgggcacctgtagtcccagctactcaggaggctgaggcaggagaataatgtgaacccaggagccggaacttgcagtgagctgagatcacgccactgcactccaacctgggcgacagagtgagacactgtctcaggggaaaaaaaaatacaaaaataattagccgggcatggtggcgggtgcctgtagtcccagctactcgggaggctgaggcaggggaatggtgtgaacccaggaggcggaacttgcagtgagcggagatcgcgccactgcactccatccagcctgggcgacagagcgagactctgtctcaaaaaaaaaaaaaaaaaaaaaattagccaggtgtggtggtggccacccgtagccccagctactagggacgctgaagcaggagaatggcatgaacccagcaggcagagcttgccgagatctgctgccaagtggtgtgagccgagatcacgccactgcactccagcctgagtgacagagcaagactctgtctcaaaaaaaaaaaaaaaaagatgagaactttagatattgcatagccacaaagaaggaggtatcagattaaaatatgcaagtgtctcggggtcacagatagcgctgcctggatatttaaggtactgtggctgataagccagaatacagcataggggaggcattaggagagagggttgttttttttggtttttttttttttgagacggagtctcgctctgttgcccagggtggagtgcagtggcgcgatctcggctcgctgcaagcaccacctcctgggttcacgccattctcctgcctcagccttccgagtagctggaactacaggcgccagccaccatgcccccctgatttttttatttttatttttagtagagaccgggtttcaccatgttagccaggatggtctcaatctcctgacctcgtgatccacccgcctcggcctcccaaagtgctgggattacaggcgtgagccaccatgcccagcccagagagggttttttttgtttgtttatttgtttttggagacggagtctcgctctgtcgcccaggctggagtgcagtggcgcgatctcggctcactgcaagctccacctcccgggttcatggcattctcctgcctcagcctcccaagtagctggaactacaggcacataccatcacgcccggctaattttttgtattgttagccaggatggtctcgatctcctgacctcgtgatccaccctccttggcctcccaaagtgctggaattacaggtgtgagccaccacgcccggcccagagagggttttttacctttctgaatgctggtctcacctaatgtaccttaaatatcctggctaatgaactccagagttctctggcttctgtctctggtgccaaacccccaggcaagggaagtcccatgaggaaatttatcccgcctcaaatctgaaatcctcctcacaatcgtcaggagttgctgaggattctgggcttagtccctggccaggattatccctttgcccatcaaaccctggctgaaatgacagtcccaacactatgactacctcagggccagctgcaagttaaagacccactgatgcctgtgcagcaagggtctctgaacccaagtctgagccagaaggtacggcaaagaaagggcctcttcttgagctaaagggataatccccaaaggtacaaggcaaaagcctcaaatgcccccagtttctgagaaacgcccagacgccccctcctcaggctcaagccagctgccaagtactggagaagacaatcctgagggctctcctggtctcctggaagcagggatatggaggcctctgtgtcaacagaatgtctctatctttaaactgttttcctggggttgtgggtgaccccactccaggaactgcagaaactcttggccaggcactctgcctctagggtgaaatcctcagggaataagtgtgcccataacaggaagggtgcgaggatagaaggggtgaattgaggaacattctgaatcaaactgaagacccttgccctctgcttggacactgagagccaagatgaaggtagggggggttgacccagtggaacaaatgccaggtcccaagtccccccctactctaccgtgtggctcccagacgtccctcctaccctgaggcttcataccctactcccccacttagctttgggggcccttttatccccccctccaacccaaaccctctccccaccaggctgggcccctctcacctaggatgacagcttcctcctcgttctcatctgcttctgcccaggccacccgctgggctcgacgctgggcctgtaggcggctgcccaggtccctccggcgccgaggcctgcctccagctctcggctcctcaggctccaggggcccaggctgggccacccggcctgctcctgccagctcctcattgtgcagtggctcttggccggctgtagggaagacagaaatgacaatgctgcctataagcccagcccggcccatggcaggaggagcggcagcccggaagcctcacctcctctgcttagcggcctgctgcccacagcacaaggccccgacttctcagtctgactggcaaggccttttccaccaggcccacagcttggtcccaggcgggggctcagcccttccctcgggcctgtgtgaatactcctctcccctcccggctccacctttccagctggcctgtcaggaggcccctatcctgatgtccccagctctcatcgagtaccccctgcaggaatccactgatttctcgcctaacaccacctgtggttttatctggctccccagccagagagtacacttcccggcggtggccgagcctcccccgggaagacctgctggatctccgccttccctcagcgtgtcccttccgctcctgggagcgcgcaggtgctcagaggtagcttgtgggcccagggagcaggaaaacacatatacaaacccgcccgctgaccagaaatggggggaaagagggaggatgggtgtatctgttctgtgccctggccaatgacatggccttctgatcggggagcggattggggagggagagtgggccctctccttggcgggaagggagagagcttcaggaatttcctggagccgcctcgcgcttctccagctcgtgggggacaggcagaaaatattcagatgcccccttcctggcacctgctctggagccaggctgggaggaatggaaaacccctgcggcctccctaacaggtgcagagggaaagggccccgacggtgacggatgggagtgtgcgccggccagggcctcaggcctttggaggtatggagttcccgggggtgaagagagggatgaggccagactctggcttggagtcgagagaaaggggtagcggcgcggccaccgattccaggtagggcactgcggaagccccacccggcacacgactagcgcacggacgcgcatgcgtcccgcccgcccaggtgcgcacgcgcaggagccgcggcgcgacggtccacaaaggctcagaaggccagaaaacccggtaccaccaaccctggtgcagcggcatctcctacctgatgccgcccggccccggctgcgagtcaggaagaggataaagccgactagcagagccgccgctaccaagtaccacacaggcgccaccatgacgagggcctcagtgcagaaccactgcgtccaccctgaggccgggatctcataggccccgcccctatttcccaatctagactccgcccactactcggagccccgcccagcggcacatcacagagaggctttaatgtcagacattaaaatgagtttggggggtgtaaagaaacccacaatgttaagaggaaattatagcagacggtatgtccagtagaaaacatctatgtatgttttttttttttgagacggagtctctgtcgcacaggctggagtgcggtggtgcgatctcggctcactgcaacctccacctcccaggttcaagcgattctcctgcctcagactcccgagtagctgggattacaggcgcccgccaccacgcccggctaatttttgtatttttagtagagatgggggtttcaccgtgttggccaggctggtctcgaactcctgaccttgtgatccacccaccttggcctcccaaagtgctgggattacaggcgtgagccaccgcgcccggactatatatgttttaaaaatcactaaacaatcccacatagtgtttatggaaacaaccgtggaaaaagtacgaaaagaggcttgggactgatgcacaccaacttcaggatagcgattacctctaggaggagggaagcgggttggggttttgctgtatctgtgacactgaatttctttctttctttctttcttttgaggggaaggggaggggaggggagggcagtactggaatttattaagctttttgtatacatgataacagaagtaaagatttatttcaggagccaggcacagaggctcgtctgttaacccaatactttgggaagtctaggtagaggtgagcctaggagttcaagaccagcctgggcaacatgatgaaaccctgtctctacaaaatacaaaaattagccaggtgtggtggcatgcacctgtgattccaggtacttgggaagatgaggtgggaagatcacctgagcccagggaggtcgaggctgcagtgagccatgatcatgccagtgcactccagcctgggtgatagagtgagaccctgtctcagaaaataaaaataaataaaaataaattcaggaccaatgaacaatggtgagaaagggatttgaaaaaatacgggccagatgaggtggctctcccctgtaatcctagcactttgggaggccgaggtgggcggatcacttcaggtcaagtgttcaaaaccagcctagctgacgtgatgaaatcctgtctctactaaaaatacaaacaatgagtggggcgtggtggcacatgcctgtaatcccagctactcgggaggctgaggcaggagaatcacttgaacccagggggcggacgttgcagtgagccaagattgcaccactgcacaccagcctgagcgacagagcaagactctgtctcaaaaaaaaaaaaaaaagaaagaaagaaagaaaaagaaaaagaaaaaatatgggctgggcgaggtggctcacacctgtaatcccagcactttgggaggctgaggtgggtggatcacctgaactcaggagtttgagaccagcctgacaaacacagtgaaaccctgtctctactaaaaatacaaaattagcttggcgtggtggtgggtgcctgtaatcccagctacttgggaggctgaggcaggagaatctctcgaagccgggaggcagaggttgcagtgagccgagatcacactattgcactccagcctgggcaacagagtgagactcagtctcaaaaaaaaaaaaaaaaaaaaaaaagctgggcaccgtggctcacgcctacaatcccaaccaacactttgggaggtcgaggtgggtggatcacctgaggtcgggaatttgagaccagcctgaccaacatggagaaaccccatctctactaaaaatacaaaattagccgggtgtggtggctcatgcccataatcccagcacttcgggaggctgaggcaggcggatcacgaggtcaggagatcaaaaccatcctggctaacacggtgaaaccccgtctctactaaaaatacaaaaaaattagccaggcgtggtggtgggcgcctgtagtcccagctacttgggaggctgaggcaggagaatggtggggacccgggaggcggagcttgcagtgagctgagatcgcgccactgcactccagcctgggcgacagagtgagactgtctcaaaaaaaaaaaaaaaagaagaagaaagatacaaaaattaaccaggcatggtggtgcatgcctggagtcccagctactcaggaggctgaggtgggagaactgctcgaacccaatatgcagaggttgcagtgagccgggaccacaccactgtacttcagcctgggcaacagagcaagactccatctcaaaaaaaataaataaataaaagaatgaaaaagaaagttatctatggacttgtaattatagatgtcagttgtgatctttttgtttgttggttttttgagacagggtctcactcacatcacccaggctagagtacagtggcactcttggctcactgcagcctcgacttcccaggctcaggtgatcctcccacctcagcctcctaaacagctgtgactacaggtgtgtgcccccaagcccaactaattttttgtattttttgtagagactgggtttcaccatgttgtctaggcttgtcttgaactcctgggatcaagtgatccactgtgcccaagctagttatcttacattacagaacacctactatgtaccaggagctgggatttaagaatgagaggtgaggctgggcaccgtggctcaagcctgtaatctcagcactttgggaggctgaggtggagggatctcctgaggtcaggagtttgagaccagcctggtcaatatggtgaaaccccacctctactaaaagtacaaaaattcactgggtgtggtggtgcatgtctgtaatcccagctactcaggaggctgaggcaggagaatcccttgaacccgggagtcggaggttgaagtgagccgagatcgtgccactgcactcaagcctgggcgacaagagcaagactccatctcaaaacaacaacaacaacaacaacaaaacacagtggctgatgcctgtaatcccagcacttagggaggccgaggtgggcatatcacgacgtcaggagttcgagaccagcctggccaacatggtgaaaccccgtctctactaaaaatgcagaaattagctgggcgtcgtggggggtgcttgtagtcccagctactcaggaggctgaggcaggagaatcgcttcaacccaggagacagaggttgcagtgagccaagatcatgccattgcactccaggccaggtgactagagcaagactccgtctcaaaaaaaaaaaaaaaaaagaaaaagagaggtgagcaaaaacagatatggtttttaccattaggatttttagaagagaaaacagaatcacacaaatgaatatctatttgcagtgcagaggtcagtgctatgcaagcagatgaaagggagctcagggaaggttttcctgagctggggcttgagctggctaagatccaagaaaggcatccatgtaaggtgggctgtttttcttcttttcaggctcctcggggtaactgatgtcccccaagccctcctctgcccccaaatccccatggccactcctctagggactctgcataatggttagtgtttctacttcaataaaagaaaacaggtcaccacccaaagcagtggttcccacacattttttttctttttcagacgcagttttgctcttgttgcccaggctggagtccgatggcacgatctccgctcactgcaacccccacctcccgaattcaggcgattctcctgaatcctgaattctctgaactgggattacaggcatgcaccaccatgcccagctaattttgtactttttggtagagatggggtttctccatgttggtcaggctggtttcaaactcctgacctcgggtgatccactcgcctcagcctcccaaagtgctgggattacaggcgtgagccaccgggctttcccacactttgatgagcatcagaatggcctgaggagcttggtaagaactcagactccctccctttcttgtccatgggcagaagtggccattcaagaggtactgacacaggggtccaggcggggggcagagggctgagtctctggaggagggaggtcagatgacttgctgcaaagagagtatcagcagaggttcagcagacccacctttgagagggcacttcctactttctgttgtgtttggaatgcaaagatctggctgaaacggtggccacggagaaggggtgatagatttgagaggctggagggatgaggaagtgaggaactctacatactgagctctcaagcctaggagtgaaaacgggtgagaagtttgggcttgttttaggctatgccgagtttaagttcacagtcgagtggatcatagctggcgggtaaggctgaaggtgagatcaggatgagggtttggaagcccttgcctagaaggaggcagttttttgagacagcataggagagcgcaaacctccagggtcacagggctgcagtcttctcctttcggagaccccattgcagagaagagcgaaagcaggggcggggtgggggtgggagtggtctcttccggttcttgaagatagcgtcccttaggcaggaggggtgggtcactcagtctccaggctcgggaggcccccagcaaatcggacgctgtgggctaggccgccaccgcgagcccactcgcccgatacgcgccttggggtccgggtcggctttccccgggacccctggccggaaactgagccgttcacttccgccaccagccggaagttttctgtcactggacgccaaggagttttcggtggctcagctgggtaaccggggatcaccatggcggcctcattggtggggaagaagatcgtgtttgtaacggggaacgccaagaagctggaggaggtgccgggagggtgttgggggctaactgggaggcggctgggaatagggcggagaaggggcttccgggaggagggaagcacgtgggaggaggcatggagagagaacagaattcagcccggaagaatgggtcctgacccggctgtgtggaaaagctggggcgcaagaagggagtggctgcagaatcggggcgccccggggttggcgagggaacgagggtctcgacagatcccgacacagggcttgtgtggtcagcgactgcgggacccggaggagtagcggggctcttaacaaccgccccgaaggtcacctattgaagtagaccccaacccagtgtcccgacactcttctgggacttatccacatcccgctgctgggccagggctagcaggacccagagagggcgtgggacggagttccacactgagcagtccgtgcctcaccaccgtcctgaaatgttctaacctcttttcgcgtgtgtgaaatggggatgatgcaggacatttgcttcacagcgctatagagaggaggagtaaaggaggcagtggatctaaagtttctgtttgcagggactttgtggctagcaagtaacagaaacacacagggagctcatgtaagccaccagatgactcctgtgggaatatagtgttatcgtgtcccacaggacctgaagttctctcaagaagctgacttgtccttgttctctctggatgctgatccctattcctgttcatatctttcccctttcttccctgctgggggatggaacaatgaggcttctaccagatatcagctccgactggctttgcttgaatcaagagtttgcccctgttcaatcagccatagccatggagtgggggtcatgtgtgggggatcaggatgacacccactggatatgtctgaggcagaccagtggggtgtaatcactagggacacctacatttgcctgtagtgtagggagggactgatgtcactttggtgccaggactgagtggccttctcaggaaccagagccttttgccgaaaaaaggtttgggatcctgaggccagaccagtcaggcagtccaccctgaacagagcccatgcaggacagtgggcatgagaccccaaacctctggctgagaatattgccctcacttaaagaaggagctggaacccgagtgcagtgcctcacgcctgtaatcccagcactttgggaggctgaggtgggcagaacatctgaggtcaggagttcaagaccagcctggccaacatcatgaaacttcatctctactaaaaatacaaaaattaactgggcatggtgacacgtgcctgtagtcccagctactcgggaggctgagacaggagaatcgcttgaacctaggaagcggaggttacagtgagctgagatgacgccactgtactccagcctgggtaagagttgagtgacagagtgagactctgtctcaaataaaaaaaaaaaaagaagaagaagaagaagaaggcactagagtagccaagggagactccttggagaacatggacttgaacacttggcctagaacaggtagtctttttttttttttctttgagacagagtctcactctgtcgcccaggctggagtgcagtggtgcgatctctgctgactgcaacctccgcctcctgggttcaagcaattctcctgcctcagcctcccgagtatctgggattgcaggcatgtatcaccacgcctggttaatttttgtatttttagtagaaacgggatttcgtcatgttggccagactggtctctaacccctgacctcaagtgatccaccctccacccatttcggcctttcaaagtgctagaattacaggcatgaaccacctagcccagctgtgtttttgttttgttttgttttgtttgtttgtttgtttagacaaagtctcactctgttgcccaggctggagtgcagtggcacgatctcagctcactgcaacctccgcctcctgggttcaagcaatcctcatgcctcagccttcctggtagctgggactacaggtgtgtgccaccacacctagctaatttttgtatttttagtggagatggggtttctccatgttggtcaggctggtctcgaactcccgacctcaggtgatccgcccgccagggcctcccgaagtgttagattacatgcgtgagccaccgtgcctggccgaacgggtagtcttaactagtggtatgccattggcagactgaggaaacctatggaatctttctcaggaaaatagtttcaaatgtacaaaataaaatacatggtattataggctgggcactgtggttcatacctgtaatcccagcactttgggagactgaggctcaaggaggatctcttgagccgaggagttcaagaccagcctgggcaacaaagtgagaccctagctctacaaataattagcctaagcatggtacctgggccacctgtggttctaggtacatgggaggaggatctcttgggcccaggaggttgaggctctagtgagctgtgtttgtgccactgtactccagcctgggtgacagagagagagaccctctctcaaaaaaaaataaaatacataggattacaaaggaagtcaactaaagtgaagtacaattatcaaaatgttacaaatatttgtgatttagttatatatactttattaatgcattaaaggattcaatctaccaatgtatgagtaattatcttaatttttttttttttttgagacggagtctcactctgtcgcctaaggctggagtgcaatggtgcaatcttggctcactgtagcctcaaccttctgtgctcaagcaatcctcctgccccagcctcttgagtagctggaacttcaggcacatgccactatgcccagctaatttttgtattttttgtaaagatggggttttgccatgttgctcaagctagtctcaaacttctgggctcaagcaatctgcccaccttggcctccaaaagtgctaagattacaggcgtgagccacaggacccagccccttaattttaaaatatcaagataaatgatattttgagatatctgcagcaattgtaatgagttataacaacatctgtgattttagtagggttaaaagtcacaggcactgctagtaatattttggtttgttacctatattcataattgaaaaagttactacatttcaattaagggttactaagaataaagttttttttcccaatccatgttcataggccttctgaattctgggtatcttctgttagagaattcctggtctaggaggatggctagggtttctgggagcattgagaagagaagagtgtgttctggatgggggcttagcacaagcagagacctgacgtagaagagatagagaagcaaggagatggaaggggctggcttgctggggtgggaccctgaaagccggggtgaggcccacaggcctgagttggtaagctttaggagatgggcagcagagttatcgatgagaaaggcggatgacagctcacgtgctcacatggagaatcactagatggtgataagtgttctcttttctcttggaacaggtcgttcagattctaggagataagtttccatgcactttggtggcacagaaaattgaccgtatgtctctgttttgttttatttttaaaagatggttggatttctctgtcttcctgtgacctgactttctgtgtgtctgtttccctgataagtgccggagtaccagggggagccggatgagatttccatacagaaatgtcaggaggcagttcgccaggtgcttgccctgcccttgtcccacacttgctcttcttgtccaggtagcttccagggcctgcgcctgctagaaacaatagagtagacacagtttgttgagctttctaggaccggcccagagtcctctagggttcagttaatattggctttggaacactgccttcctttgccagccttgaatacatggtatctcccccagaccaccaccatacactcccacgtacacacagactccccttcccccaaatgctcagacaatggattccagccctacatcctccccacacacatccaccgctgcattcacacatgttcgtggaactgagaaagcacgctgcggagagtcaggctgagtgtgaatcccagctctcccattgctgtgcctggagcaagctttaacaatcggccaaagcttggtgtcctcataagataagagattggccaaagttaagagattggccgagggcagctcccatggtgctgtctgccacagatctcagctagctgagggctggccccagcctgggtgacgcgggtgacctggacgttccaggtggggatggtgatcatgggtctcagggctgtatgtctttgtgctgcaggtacaggggcccgtgctggttgaggacacttgtctgtgcttcaatgcccttggagggctccccggcccctacatgtgagtgactacctccacccccttacagggcgtcaggcccaaaaccaccagaactgcaaaatgatgaggtacctgatactgcaggtcattccctgtcttagcatcaacagcctttcacgttgtcccgaggaaagacgggataggagaagcatgcctttcttttgtaaagtgtgagaatgcgacctgtaagtggagatggtaaaggggaccccacgcatttgagaagtacattcataggtagattaatttcaggaaagagaaaacaaggaagttggaatctaaaacttgatttctttcttcctttcttttttttttttttttttttgatacagtctctctctgttacccagacggctggagtgcagtggcatgatcatagctcactgcagtctccacctgccaggctcaggtgatcttcccacctcagcctcctgggtaactgggactacaggtgtgcgtcaccacacccagctaattttttgtatttatttatttatttttaattttttaattattttattttattttattttattttgagacaagagtctcgctctgtcgcccaggctggagtgcagtggcgcgatctccgctaactgcaagctctgcctcccgggttcacgccattctcctgtctcagcctcccgagtagctgggactacaggcgcccaccaccacacctggctaattttttgtatttttagtagagacggggtttcaccatgttagccaggatcgtctccatctcctgacctcgtgatctgcccttcttggcctcccaaagtgctgggattagaggcatgagccaccgcgcccggcctgtatttatttatttttggtgtgtgagacagggtctcagtctgtcgctgaggtaggagtgcagtggtgtgatcacagctcactccctgggctcaagctatccacctgcctcagcctcccaagtagctgggactgcaggcacatgcctagccagtttttttgcattttttgtagagataggattttgctacgttgtccaagcttttctcaaactcctgagctcaagcgatccgcctgccttagcctcccaaagtgctgggattataggcgggacccacctcgcctggctcttggaggcattctttttcatttccccttggctgtcaatagggaacagcctggaaaaggtggtaagaagatccagctgctcctggtgtctgactgtcctttctttctcttgcagaaagtggtttctggagaagttaaagcctgaaggtattatctgctttgtttcttccctggatctgttgggaatgagaatctgggctttgtctaggggagggaccccaactagtaatcaggagtcccaggttctagcccccaccatggagcctccacctcattttccccatctagcacctgcagctcgtaccctgtactccagagagcactgtgtgggggagggatgatgggagctgcagggttgaggaacaaaggggctgtacttaattctgggtttcaagaggaacttggcccttgtgactgccttagccagggcctgccctgggagttggaggactgcccctcctggaccccagcagtgcatatcctgtcacccacagttgcaagccaaaatgtcccctctttatgtgcttttatttatttagagacagggtctcactctgttgcccaggctggagtacaccggtgtgatctcgactcactgcaacctctgcctcttgggttcaagcgattctcctgccttagccttccaagtagctgggattacaggcgcccaccaccacgccctgctaatttttgtatttttagtagagagggggtttcaccatgttggccaggccagtctcgaacacctgacctcaagtgatccgcctaccttggcctcccagagtgctgggattacagatgtgagtcacaacacccagcctatttgtttacttatttatatttttgagatggagtctcactgtcgcccaggctggggtgcagtgcgtcaatctcggctcactgcaacctctgcctccctggttcaagcgatcctcctgcctcagcctcccaagcaactgggattacaggcatgcgccagcacgctggctaagttttttttttttttttttttgagacaaagtcttgctctgtcgcccaggctggagtgcagtggcatgatctcggctcactccaacctccacttcccggattcaagcgattctcctgcctcagcctcctgagtagctgggactacaggcacgtgccaccatgcccagctaatttttgtatttttagtagcgttgggatttcaccatgtaggccaggatggtctcaatcttctgacctcgtgatctgcctgcctcggcctcccaaagtgctgggattacaggtgtgagttaccatgcctggccttttttttttttttgtgacaagtttcactcttgttgcccaggctggagcgcaatggcacgatctcggctcactacaacctccgcctcccgggttcaagtgattctcctgcctcagcctccctagtagctgggattacaggcacctgccaccatgaccagctaattttttgtattttttgtagaggggtttcactatattggccaggctggtctcgaactcctgacctcaggcgatccacccatcgcagcctcccaaagtgctgggtttacaggcgtgatccactgagcccggcttaatttttgtatttttagtagacacggagtttcgccatgttggccaggctagtttcaaacacctgacctcaggtggtcccacctcggcctcccaaagtgctgggattacgggcatgagccaccactcccagcctattttatttttttgagacagaacctcactccatcgcccaggctagagtgcagtggtgtgatcttggctcactgcaacctctgcctcctgagttcaagtgattctcctgcctcagcctcccaagtagctgggattacaggtgcccaccaccacgcctagctaatttttgtatttttagtagagacagggtttcaccacgttggccatgctgatctcgaattcctaacctcaggtgatccacccacctcggccttccaaaatgctgagattacaggcatgagttaccgcacccatccttatgtgcttttaaaaacactttacattatagagcatttcaaacctgcatagtagaatatcataataggataatgggcataaatatatacagttattatttgtcaattaaaaaaagcatagtagaataatgaacctcagttgccatcaaccagcttccagggttatcagcacgaggcctattttgtgacatctgtaaccccccttatttttcctcagtccagtattttaaggcaaatcacagacatcatatcatcagtaagttcttcagcttgtatttatttttatttttatttgttttaattttttttggagacaagggtctccctgtgttgcccaggctggagtgcagtggctcaatctcggctcactgcccaccatcagggctcaagccatcctcccaccttagcctcctgaggagctgggactacaggtgtaagccaccatgcctagctaatttttgtgttttttgtagaggtgaggtcttgctatgttgctggggctgatatcaaactcctgagctcaagcaacccacccgccttggcctcccaaagtgttgggattacaggtatgagccaccgagtgcagccactgtatttctaaaaggtgaaaaatttaaaaactgttaaacaagtaaactataatcattttaaaatactacataatcattttttggatttccttggttgtagaaaaagtgcctattacagttggttagtttttgtgggtttttttttgtttttgttttttctttcctgagatggagtctcgctctgtcgcccaggctggagtgcagtggcccgatctcggctcactgcaagctccgcctcccttgttcacaccattctcctgcctcagcctcccgagcagctggagctacaggcatcagccaccacgcccggctaatttttttgtatttttagtagagacggggtttcaccgtgttagccaggatggtctcgatctcctgacctcataatctgcccgacccggcctcccaaagtgctgggattactggcatgagccaccacgcccggcctacagttggttagttttgaatcaggaaatcaaacaaggtccacactgcattggctagttttctgactttaaataaagccttgtatcgtcagcctgtgccagagggaagcgagaatgcccagagacttccatttcaagcctagtcccactgccttgggctctgccgcccccgctaccccaattgagacctaatttccccttttagggaattcctccctccccacccttagtgggcgtcttgggagtgggggtgggagttggccattagggatgcactgagccctcactgcccacccgcaggtctccaccagctcctggccgggttcgaggacaagtcagcctatgcgctctgcacgtttgcactcagcaccggggacccaagccagcccgtgcgcctgttcaggggccggacctcggtgcgtacccaccttgatgcagttcccgccgcgcgccgccagggggtgccgcgacccgagccgaccgccccgagtctgcgggagggtggtgggaggggcgccttggggccagagatatctgtgccttgctgagaggctcccctgcgcagcataggtagaagtgctgtggatcctaggagggtggtggaaagggttccctggggccagagtagttgcctacgccttgctgaggggtgcccctgggcaggacaatggaagtgttgtcaattctgaaacctgtttgacccctgaggctgttgtttcagggaaacagttggctaacagctcctgaggcctgatagacccagaagtgcaaactgaaggtgacaattcccaaagctatttttttctgtttattttatttatttatttattttttgttagtgagaaaccacacttggatcaaagctacatctatagcccagacttctctaacctcagatttccttattcaactgccaaggtgcttgactatctctcagcctttccagcttttcatgtttatgtataatagaatcttaattcttttttttttttttttttttttttttttgagacaaagtcttgctgtgttgcccaggctggagtgcagtggtgtcgtctcggctcactgcaacctccgcctccagggttcaagcatagaatgttaattcttggccaggtttggtgatttacacctgtaatcctagcactttgcgaggccccagcgggaggctttcttgagcccaggtgttcaagatcagcctggacaccataacaagaccccatctttgcaaaaaattttaaaatgaggccgggcgtgatggctcacatctgtaatcccagcactttgggaggctgaggcgggcggatcacctgaggtcaggagttcaagaacagcctggataacacagcaaaaccccgtctcaactaaaaatacaaaaaatatctgggcatggtggcaggcacctgtaatcccagctactggggaggctgaggcaggagaatcacttgaacccaggaggcggaggttgcagtgagctgagatctcgccactgcactccagcctgggcaacaagagtgagactccgtctccaaaaaaaaaaaaaaaagaggctgagcacagaggctcacacatgtaatcccagcactttgtgaagcaaaggcaggaggattgcttgaggccaggagtttgagaccagcctgggtaacatagccagaccctgtctcaaaaataaataaatagccggacatggtggtgcacacctgtagtcctagctacttgggaggctgaggtgggaggatcacctgagcctcggagtttgacgggacagtgagctatgatcgcactcctgcactccagccatggagtgacggagtgagacccagtctcaaaaaaaaaaaaaaaaaaacaaaccttaattatttgcccaaacttattccttccgtgagatgtattcaacaccccctactgcctatcactgctcacgacagcctccacctcccaggctcaggtgatctcccaccctggagagtaactgggactacaggcgtgcaccaccacacccggctaatttttgtatttttggtagagacagggtttcactatgttgcccaggctggtcttgaactcccgaccttaagtgatccgctggcctcattctcccaaagtgcaacctccatctcctgggttcaagcaattctcctgcctcagcctgccgagtagctgggattataggcgtgagcaaaaaacatttgttgcgtggttgaggttcagtaactggccttagtcacgcagctcctcacggcagaagcagaatttgcctttgggtctaaattacttggcatctatgtgactaatcccaatcatgtaccacctccgttgtattttttaaagagtaaaaaaaaatgtttttgagacagggtcttgctttgtcacccaggctggagtgtagtggcatgactaccgttcatagcagccttgatctctcaggctcaagtcatcctcccacctcagccttccgagtagctaggacctcaggtgtgagctaccacatctggctaattaaaaaaaaaaaaaaaattggtagagatagagtctgactgtgttgcccagactggtctcgaactcctgggtttaaaccatcctccctcctcggcctccccaagcgctgagattacaggcgtgagctaccacacctggtcccttgtatttttttcagttagaatcttttgggtttttttgtttgttttttggagtgtttgtttgtttgtttggagtgtttgtctctgtctgtcgcccggactggatcacagctcactgcagcctcgacctcttgggctcaagcagtcttcccaccaggtagctgggactacaggcttacaccaccaggctaggctaatttttgtattttttgtagagatggggtttcgcctttgccacgtggctcaggctggtctcaatttcctgggctcaagtgatcttcccacctcagcctcccaaagtcctgggattacaggcatgagccaccgcgcctggccagattttctttttcttttctttcttttttttttttactttgataacaacatgacatttcatgtcactggattacaatttgttctttttctaacattttcactgtggaatttccctactacagccagtacgtattgtactcactaatgtgttcatgaagtggggagttgggtacctgcttcctgttgcggtgtttcatcttattgttaaagtcttccttgtattttcaggaacgctgtcatagtagccggcatctggcttgtccacggagttcagggtacttagcttcctattaggagaaaacgttttctgtctatctttctttctgtctatctttcaaagtagcctcattgttcttcagtgatgtcccaatttgtcccgggtgtggctggcgagggcgcgtggccccggaggtgctggtggtcctgtgggtccatgcctcctccctgtgtgtgagggaagagctgccccgctctgctttttattgtattcagcaaacatttgcaggtgctgtaggggccttgcaactacattttgcgtaagttgggtcaaatcaaattcacagactcaccaaactcatactggccactgccctcctcgtgcttgtcctctggacccagttacacacctgtcccccctttcctgtggcagggccggatcgtggcacccagaggctgccaggactttggctgggacccctgctttcagcctgatggatatgagcagacgtaaggagccctgcttttcttccctggggtgtggggttggtacagccatggtttgggttgggccagtgccccgcccaagtgcaggcatgcggatatgggcaggggaggctcccagggtgctgttccagccacaggcagctctgctggggtggacactaggaatctgggtggcccagtccatggttggggaggcagccagatggcactgagagtcctgggctctaaggctccaggtcaccccacatcagctgtgtagccagtggtttcgcctttctggccttggcttgtaagctgtacatctgacttttttttttttttttttgagatggagtttcactcttgttgcccaggctggagtgcaacggcgtgatctcaactcactgcaccctctgcctcccaggttcaagcaattctcctgtctcagctgagattacaggcacgcaccaccgtgctcagctaatttttgttatttttgttagagacggggtttcaccatgttggccaggctggtctcaaactgacctcaggtgatccgcccacctcggcctcccaaagtgctgggattacaggcgtgagccaccgcgcctggccacatctgacagttttatggcatcattttctgacccccatctaggttgggaaaatgtccaggcttttgcagcctctggtgggcactattttatgccctccaagtaccagttgttctctgtagttcgcacaaatcgccccttgttcacacaaggcacgggccattgttggaatcaggctttccaagctggaggggcccttagggagcgcagtgtgaggccccacaatagccccagcaggggtgaggacattgtggaaccagccactagccatatggggctgtggagcacttgcgtgtggtgagacccagaaacggaatatttctgttcagcgttaattcatttaaatagccacacctggctagtggctactggccgccgtcttgcacagagcagtctgcaggccacgggcggggtatgggattctcacctcactgcggtgctggcatggaggtcgggcccctggccagctgttcaagtgctcccccgccctcagcgcatgagaggagactgctgtgtttgctctgtcaggccccactgcttcctgtcaacagatgacaaagctgatcaaacatgcagctcatccccccctgtccccagcttcccttaatgacttttgggcacactagagcaagtttaatacccctccatgctcattcatgggggtttctgcctacaggggaattgaaaactttatccgatttttaaaaattcactggctgccaggagctgctgggccccactcccctttccttggggtctgtgagctttggtctccagggatgagatgaggtagggttgggagggggtgcacttccttcctgaatctgggctccctgagctgctactgtcacccctcaggtacgcagagatgcctaaggcggagaagaacgctgtctcccatcgcttccgggccctgctggagctgcaggagtactttggcagtttggcagcttgacttctgcagctggaggaggcccctcaggccggggatctggggagggctagcccaaaacctcccgcatcgggcaggcaccccctgaagtacttccttcagggtttcccctttgtgagggtgtcgagtagcctcaccggcctgtctggaggagcagctggctctgctctgagaaactctggcaagtggacgccattctcttgcccttaggattcactgctctctcctacagccgccaggcctggggtcctgaaaggaccttgggtggtaaagctgtacttggtgggagtgagggcgtggggaggaaccatgcaaatcgccttccatggtttttaaatgcagtaaataacatttctggatgagacttgtttccaaaataaaccagctatatctgttttgaaccctgccccaggcaggtgtctgtctcagtctcctttggcaggtgcaggaagttttttgggtgggggtggggatggggacacgggcagcaccgtgtggaaggcattcggatgccactgtgagctggagtgttacgtctccactcgagttcttgcctcattcaatggcatggattgcgggctgacctccaccctggatccatgctgccccccacccgcaggtagtgccagggcctccatgaagccttgctgggttgggggctgggtagtgtggcacgcccagtgcttttgccttatgctgttacacatcagagccgcgaaaatgttggtttacaattacaatggccagttcatttttatggtggggaggggctggagtcctcgaccccactcggcgtgatcgccacagttcagcctgcgggctgcaggcccctcgggaggccctgcttatgccacacgcccttactctgtgccctggcgaagccattccctggaagggacctctccaggtggctccgttgtcagagtgctcaaccccaaggatattcaaggggggcgtgatgggctcaggctggtggggcacccccaggcttgcttctgtgcccacaggcagctctggagaggcccctgccgtccctgtgactccatccagcaggacggccctgggtgaggacagagtgtcattccttcactcccctcttgcctgcaagccccggctgggttaaatccccaggaggtgctgcgtccctgcccagcctcctgagcctccttgtgggtgggagatgtctggctgggcctcagacatggggtgctgggggcctgcctgctccttgccagttgatcatggatgtagcccccctgtgcagggaacacccaggctactgatgggggactccaaagaagaatcacatgctgcctgggtggggtgggtacataggcttggggcagggcacctctctgtgtttcctgttcagctcctccagaattttgtcctgggtgcacacaacactttctggccattttttttactttagctacctgtgatactgtgaagtatatatctggttccaggcaaggtggctcacacctgtaatcccagcactttggaaggccaaggtgggaggatcgcttgagcccaggacttcataaccagcctgtgcaacatggcaaaaccttgtctctgcaaaaatacaaatatttgctgggcatggtggtgcgtgcctgtggacacagctactcaggattccgaggtgggaggatcccgagcctagggaaatggaggctgcagtgagccgtgattgcgccactgcactccagcctgggcaacagtgtgagaccctgtctcattaaaaaaaacatgtgtatttggtctttgacccctttcctagcaaacaactttaaaatcctcagaaactccacactgatgtctttttgtgtgctaatgaggtggctggcagcatctaggtagcttggttatggaaagaccaagacaggactagaggactgggactttcggtctccaccccccgccacacctccagggaggggcagggctgaaggttcagttgataaccagtggccagtggtttattcaatcatgcctgcataatgagacctccataaaaacccaaaaggccagggtttggggagcttctgaatagccgaccatgtgggggttcctggagggtgacaccccggggagggcacacaagctctgtgccccttcccccacacctcgccccgtgcatctcttcatctgaattctccgtaatagcctttttagtaagccagtagggtggggctgaggccctgggcccattcagctcttattcatcactgggaactccatcaatgcccaacccttaaaaaataaaaaaataaaaaatttaggctgggcttggtggctcatgcctgtaatcccagcactttgggaggccaaggcaggcagatcacttgaggtcaggagttcaagaccagcctggccaacatggtgaaaccccgtctctactaaaaatacaaaaattagccaggcatagtggcaggcacctataatcccagctatttgggaggctggggcatgagaatcgcttgagcccaggaggcggaggttgcagtgagccgagatcacgcccttgcacactgagagtgagacgctgtctcaacaacaacaaaattattaaaacctgctaaatataagtaaatgtttccctgacttgtgaaccactctagcaaattaattgaacctaaaagaggagtcgtgggaaccccaagttgaagacagtgtgtcaagttctgcaggcccagacctcagactggtgggaagttaggggtggtctcgtgggactgagccctcaacttggggtttctgaagctacctcctggcaggcagcagttaggttgaattgaattgaattggtgggcacccagcagctgtcccgtgacaaatccctcgcgtggtcacagaagtcttctgggttgactgttgtgcacagtgagagcggaggaaaacgttttgagttggtttctccacactcgctacccgtccccagacagcagggtggagagcatgctcatacccacctggattggttctcggggccctgggggctcctgatctcccactcagcaccaggctacccagtgtaaggtggcgtctcatgtgggcttacgtttctctaattaccaaggggtctgagcacctctcgctactcctgttacggttgggcctccttcttcccctgttcacggcctctgcctcttctgttggggctgctgtcctttgctggtttgcaggaattctttgcatatttcagatatattttcagttttagatgcagccaatctcttctgtcggccaacttagtccatggggcatgtgtcaagccagtccaggaggtgatgtgagccccaggtgttcctgctgaccactgatgctgcgcacccggcactcccctgagcctcagagccatattccctgttgtcggctgccattgggagaccctgacccaccaacaaatgagcaagccagaaacactgcaccttctccctccgtcaaaccattcccaccccgtgtcctgccgtcggcagtcctcccacctccctccatcgccaccagtgctgcccctgccctgtaaaatccaggatccgcacaacagatgggatggttcacaagtgctccacacgaagcctcggcctcccggcaggcagctttcatctgagagtcacagggccctttgctgtcaccctgatggtccctcccgccccactgctcttcaccagccacagcgcctcagtggccccaagccctcgctcctctggacccttgcacatgctgttcccagaacgctttccctgcaggtccctggagaaatggccatgcgaaggcctcctggatcttccatgtttcactgttgggccagcacccactgtgcgacgttggaggtgacagaccacaggtggcactccacaaactctgtcccttgcattccacttccccagggagggcttcccctccccagagtgggggtggagtggcagtagcagggacacaggtggcacataggagcctagaaacaggagctttattctctaatgtgcgtccagcaagttccttacacaatcaaggaaatggtttctctttcaggcatcgactcttttatcaaaagaaaatccatcctgctcagtcccacccaccctgggcagaagctgccctgagcaacgctcttggcctaaagctaaaggataatgggagaggggtgggcacataccactgcacccctacaatgcccagatgccccaggcctgagtcagccatgagaaggcgcagcacagagcagtcacccacacacctacacctcccctcacagctccagagccagcctgggaggacgtggagggctggcgaatggggcgtgggcagggtctgccagtcaaggcctgtgctcagcgtccatgacatccaagtacttggcttcaatgattcggggcagcaggatatagctgtggggagggagggacaggaggatgagcctgggtcagagagaaggcagtggacacccatcccagcccaccccagcccacccacagggccaggctaggcctctcctccccgcccgcctacccccagcccacccactctccactcctagactggagcccctcctgcccaccacccaccccagcccgcccactctccacctctaggctgggctcctcctgcccgccagcctccccagcccgcccactctccacccctaggcaggacccctcctcctgggcacccaccccaacccgcccattctccgcccctaggtgggacccctcctcccagccgctgccccagcccgcccattctccacacctagactgggcccctcctgcccactgcccacccgcctgtaccggatggggatcatggcgatcatgatgaggggaaagatcatcttcatgtagggcagggagctcatgccgaaggcacacagcagcagcagctgaagcacctgcaggcccgtgaagtagtggatcttcctctggggcaccctccggatgtagtgtgtcggggggtacgcagtctgtgggcggcagggaccgggtgtgggcaggcatggggctgtgtccccacccacgccactccctcgcagggccaagcgctcacctgctccttgagcagcagggccacgcgctggacgagctggttgccatcgagggaggtgagcgcgatgtagaggaagaggccatagagcacgggcttggggatccactgaagcgggaccggcagcagcaacagggacaggcccaccaggacgctggcgcccagcgaggtcagccgcgtctccttcacgttcacaatcctgcggtggcccgagccgcgagtgtcacctctgcgcccctgtccacagggcctcactcctccctatgtcccatgtggccagaggctccccactcctcagggtccacggctcttgccagcctcacactcacgtgtcatagatgtgtccgttctccacacgctcctccactaaggccagggctcgcacgtgcagcggggagtgggggtaggcggcatggatccaaggcagcccaaacagagacagccctgtgttgatgatggcgaggagcaggaggtcccagtggtaggcagtgcccttcaccagcctgcagcagacgggcactcgtggacagagccccacagcagaggcccgggccccgcccaccccaccctcacccaccctccacacctgttctccggtgcattcaccaaggcggccaccaagttctgctcgatgaagaagagcatggacagcaggaagccgaggcccatggcaccgctgacggccctcagggacagcgactggatctgcgccatcgcaaaggggctctcgctggggttgtagcggaacttgctcactgcagtaggggacaggctactgctatgcctgcagcgcctggggagctaccccacgtcacccaccgcccggccccaactcactctcgatttcccggaagccatgggagctgatgagggagaaggcgagcaccgcgatgggcagggcgcagtcggacaggatctctcgcacgcaggggtgcaggtaggggctggggacagcaggtgcatgagcacagcctttgacccatgcggcccctcccctccccatgcagcccctcacctcttcttgaattggtagagggtgtagcccagccagagcgtgcccagcatgatgaggaggctgagcacggcggtcgcctggcctgagtgtgtggccgagggcagctccgtggggctggcgaggaagctggcgttgagggcagtgtggaggctggcgttgaggctggcgccgaggcctgacaggctgacaagggatgaagtcctttttgtgtgatagtcgtccaagtaatgcccatagtagtacttccagaagactgtggacacacacccacaggcctcagccctctccagcgtgtggcagggggaggccctggagggaggggatctcagggagaaagggctccagggggaaggtgaggggaccctgccgacgtgcccatgcacccacactcctgcccactgtccctgtcccatctctgacaccccatcacagtcggcccagtgcctctgcccccacggctggtcccacctggggcggccccgtcaccctccagcgtggagggctctgccctctgccagcccaaggctcccagagcaccgcacccttgatcacgggcacacactcagcttgagccagtcctatgtgcccccagccaggggcagtgcagaacctcccatctcggctgagcgccctgttcagcaggtggcccccagccgcactcacttttaaccgtgcccttgacggcatccagcacaaacgtgatggaaatgaagagggcgatgatctcctccgtcgacctgccaggaggccatgagcctcatcagagtgggtgtggtcagggggcaggtgggggaggcctccctgagcccctgcacagtcccctgcctccccctgccaggaagaaggccagggccccaggccttgcctgagcccaccccagccccttggggcagcaatatggtgggggcacccccaccaccctggggttacagggggctgaaccagatcccaagccttgagggtcccagcagctcacggaagggccagtcacctcttgaagagactcatgaccaggctgaggttgaaaaaggcataaagcgcaaggaagaaactattccacaggcccgtccatgcgtagaaggagttgaagtccaggtcatagtcatcacagatgacacgaatcactgcaggcagggggcagggcgggtcagggcccggcaggaaccaggggtctcaggcaccatctcccgcctcagcccccactgcaccctggatgtagagcgccaggggcgcggtggtcagcagaatcaccaatggctgcccagagaagagcgcgtagagcaggcccccgatgctctgcccggctatggtcttctgcacgtctgtgggggtgcggaggtcaggtgggcgccgcagcccagggcccagcccagcatacccccacccaccgcccaccgccagcccctcaccgatggccccgtctgtgttctcgtcattgagagacccgaaagcgatggtgggcaggaggcaggcgaagtagaggaacagggtggtggtgatgtatttgcccacagccttgtttttcccaataatgcctaggaatgggggatgggagagagggtttgctggggatgcaggacaggcacacgtgtgggcccaaggcctggaaagcagaggccacgtaccatcagtgaagtccaaggggtacaaggggaacctgcgtgcgatgtcctcccggatgcccttcccaaaagggacaaagtccttgcactttgggggctggaggagaggacagagcgcctgttagccctgtccggcccatgcccccgccgaccctgccggcccccgccggcctctaccctgtacctctgggtgtctgtgggcagggagggagactgtgctgcgttccttcgttctcggcgccactggaccgtggctcaccatggtgagcagctgtctctgatgcaccaaggcctccttgaattcctcctctgtgcgggtctccaggagcttctggcggaaggcgatatccgagaacatggtggcaaacgtgcgcgccacctccatcgcagtcttagtgcttttctaggggtggaggatgggagtcacccctagaaacagaggaggccctgcccgggccgagcaggtgaaggtgctctccccatgaactggcagcaggttttttgtctgtttgttttttgtgtttttttgagacagggtctcactgtcacccaggctgagtgcagtggcacactcacggcttatcgtagcctcgacctcccgggctcaagtgattctcccacatcagtcccctgagtagctgggaccacaggcacgcaccaccatgccaggcaatttttaatttttaactttttgtagagacgaggtctcactatgttgaccaggctggtctcaaactcctggcctcaagcaatccatctgtctaggcctcccaaagtgctgggattacaggcacgagccactgtgcccagatgctggtagcaggttttattccacaaagttcaggcattagtgtactctgccatgatttcaaccaggtcagcagatcaccgcaactaccatcgatctatatttttgttataaactcatgatttcttataaactcaagatattacttttgtcctaagcaacaaaagtctgtgtgatcacagataatgaaaccacagtggagaaaaatgtttccccagctacgtttccccagtggtatttgcactgtctgctggtttgactttcagagagggtccaagcccgtcaggcactctctctctcgcccggccaaggtgaagcccgtccgtgaaccatgaactcacgaactcagtgtccagccctcatcacagcaacctgctcacctaggggcagtgtctgcccgtctgttgctcaaagctctagtcccggggcactgtgcatgtttgctgtagaagaggcccgtgcctggcagggcatggtggctcacgcccataataccaacttttttgggaggctaaggcaggcagatcacttgaggtcaagagttcaagaccagcctggccaacatggtgaaaccccatctctactaaaaatacaaaataattagctggctgtagtttttggtggtggcgggtgcctgtagtcacagctacttgggaggctgaggcgggagaatcgcttgaacctgggaggcagaggttgcagtgagctgagatcacacctcaacattccagcctgggtgacagagtgagactctgtctcaaagataaataaataaaacaaacaaataaacaaatacaaaaccccaaaagaactagtccatgctcctgaggaggagcccagtgtcgggctgggggatctgcctcaaggcaccaggctttaactcagctctgggctattgctccttctgtgtgggcaccctgctgggggccactccttccaacccaggggctgcccttcctctcacaccagcacagttgcatttgtggaggttcccgccatgtctgagatccctgagaaccccatttgcacacagaaggccaggggcaggagcacaagaagctaagggaagctgaagctgaaggcgctgccaaggccttgggaggggtcctggcaatcatctgttgagacttgttaaatccttttccttaaaagactcccgaaattgtatcagttccggctcccacaaaaagcatggtgtcccggccagggggtgtgtggcccaggaaggagcagggaccctcagctagcaaatcgcaaagtcaaccaagtcaaagaagggctggcgggcgggcaggccagagaaggccgcgtgtttgaatagggatagtggtcaaaagcgtttcctttcagtcaaggaaatacgaacttttcggcaatccccggggacatgaggacttgccgggcctagcaacatgtttctgacacacccacagggccgaggcgaaggggagggtgaggaccaggccttcagaggccaggacatgtgggaggggaccccaagcagagggcgggtaacccggggccctccttcttccccaggacacggcactacccactcaccatcttgggtggggccagcaccaggatgacgaaccgaacctcacaggaattctccccccagttctgtgggcgaaccaggcggctgatgcacacgtgccgcttctgtagggccttcatggtacagctggcaggggcggggaggacacagtgcacagttgcaccccagggagctggggctccccgacccagaaccccctcgaccttgacccctggcgacctctgctagggagggaaaagaagagcaaatgggacgttccttggcagtgctccagccctcttctcccaagttggttgggccgccagagccccaggactcacaggtgggctggcctctgcagggcacaggggacatgggacacccagttccactgcgacaagaaggggggccaagtggcctggcaactcacatgatgcagagccacgactgctggtaccgcacccctgtcactgtggcggtgaccccttggatggtatctgacagcaggtggactgaggaaagagtgagggggagggtggtgggtcaacagcccctcccaacgcccccgcccgggccgggagaccggcctcacctttaccccgcatgggtgccccggcatcggtgaagagcatggccatgagcaggtccaggttgcagttgggctcattgttgtcagggtccctggcgaagcggcgaagcatggtccgcagcacgttatccagggaggtggccgtctcgttcaggacgatgctggcctgcgccaggaagccatctaggtcgcggtgcgcacggatctcttccttgaagttctttaacttcaggtactgaggggaccccagggacagaaccacacgggcccatgtatgagatgctgtcactgcctggtccctccctcccagccagccgcagcagtccagcccccagcccccagcccccagccctgggctggtgcgagctccctgttgagctgctcctggaggcatgggaagaggggagcagcgggaggattctcagggaagccatcacctcagcccccaggtagaggccccaggaccacctgcaggacaggccattcacctttcgggaggtgtgcaggagcacacagccaccggaagtcgcttcattctctgccggagaaaagcggggagggctcagggtgccaccctctcctcaggtctttcttagtaaggcgagtcacacctgcccagtcccgtgccttcccccagtctgcccctgctgcagcccccataccagtgttggtggcctgcatctcaaggttgacattgacaaaaaaacggatactctcgccagacacgatggaggagttggcagtgtcgaaggcctcatcccccaggatctcctctcgggcttcgaaggtgtcatctgtgtcacacttgtagtagcctagagacccccaagagcaagagggcctggctgttaaagtgccacacacaggaaggaggggctccaagcccagggagcagggacccctggactgtcccactctcgggccgtggtgggagaggccatcccataggcgaggaaggcagcttctagtcctgccccagccccacacaggacatggcagctgccacaaagtgagtctccagcattccctagccgctgagaccaggaccctgcgcagctttgacccttcagcgtgagaaaaacatgtccactccagacacattggggcaggcacggagtgcaataatgcagatgagactgcctggcccctgccctcccaaagtagggaacacagggaaggcagagaagctgcagtatccacgtctctctctctctctctctctctctctctcacacacacacacacacacacacacacacacacacacacacacacgctgccttgtgggcacagggtcttagagctccgcctccccaggagggcaggtggggagaagcatcgaggctgagagacccaggacaggtatcagacaaggtctagggagcaggaaaaccagggaaacagagccaggggctgacaggggagaggaccccaaggcctcatgtcagccctgcccccatcgtgctcctcttcatgttctgggggccctgggtaagggcacatggagagtgagggtgtgtaatggcacctgtgggatgtgggaccccagaggtgagagcctgctccccttggtcctcaattcctgcagctggccagcagcacacccctcttcctacaggaagatttcctggtaacatgcaaatattcctctgccctgagccctgcagtggctccctgcagcctacagatcacagcctgagccagccctgctccccctgccctgaccactggctcctcaggccatccggtcagcaccctaggcatgcaaggtcctgtcctccaagctgagggcttccctccctggagggcctttttcaagactcacttggaacctcctcctccaggaagtcctcctagatccctgcctcacccctggccactggcagcccttcctgtcttgtgggtcccctaaggttcctcacttgtaggtactcccaggaaaggggcccttatagcccagaccccactgatgcctgacagacacctgtgcagaaacaaggatgggtcagcagcacgcctgcacctgccagggagtgactcaccctgactcacttctactcccgccgccagtttccttggcacatcccaggccctgttcccccagtgtcctgagtttagcctgggccccttctgggtaggaagccctagtgcctcctgcatcaaagtccccagggactggtgactcccaggcccaggcctgcactacctccagagcccagagaagaaatattaggtcaaaagacatccttgcctttgggaggccaaggcaggcggatcacgaggtcaggagatcgagaccatcctggctaacaatggctaacatggtgaaaccctgtctctactaaaaatacaaaaagaaattagccgggtgtggtggcgggcgcctgtagtcccagctactcgggaggctgaggcaggaggctggtgtgaacccaggaggcagagcttgcagtgagccgagatcacaccactgcactccagcctgggcgacagagcgagactcaaaacaaaacaaaacaaaacaaaacaaaacaaaagacgtcctcactgctttggttctggagctcatgataaactccttcctccccgggtcaggcttgccttgtttaaactgtctggttcccctggcccgaacttgtcccagcctcccctctgcccctcaaccagcacccactagtcccctccactgcccttcacacagccccgttcttcccccattcttcccctgatgccctcagctctaccttagacttagtgctcaggtcccctagattaaggacctgcccagctgacactaccaggttcctggggggctcctgcaatgccaagtcctagtcccagccccatacgtaacctgcccaccagcagcctagcacacagagccccatgtcctgagggctctgggtaagggaacatcagccctgtgtctacgcactgctctacaaacaaccctcgaatggtcaggtcactcatggggctaggcacaggacacagcctgaagccagcccagagacatgaggaggaagacagctggactggtacaagcagggacagcaggaaggtgcccgagggactgcagcacagaggccttatatttctttaaagagacaacgacagatattccctccagggctgggtgaggacagagggacaggggcacacagaattcttggcccaaggctagtcagataacaggccattgtcacagaaaaccttgggtaagaatcccagagggttcacctggtccaagtagcccaggagaatgggcagcctgccctctcaggtccacgggggatccgcccatgtctagcttcccgaagagtggaagccaaaagcattccagcactagagtggcccagataggcgagcaaagccacaggactctggtgggtaggctatgcaccctggaggcttttgcccgacaagctctctctgcacacacacactccccgagaggtactcacttgaatcctcgaagtatccattctgcgacatggtgggagagttttctgcaagggaagcagaaaggtcaccagccccatggaccaagccctggacctcctgtgtgcacctgtctccccgccccccgacctggctcattccttcgctcttccgagggatgcaacccacgccaccctagggagaaagggaagcaggggacagtgctcgggagggggccccatagcaggggaagccagccttaatctcagaaattcaattgcttagcccatctgctaggggctgcccaggcgggccagaggcgaggaggagagacgttccagggatgtcttcccaccgagttagtaccagtaccatgttcgctaatccaggttttcctgagaaaaccctgccccgctgcagcgagaggaagggaccgggcccgagcgggcctctccccctctctcctcggatgccaaggcgggggatctctctgcacatccctcttctcactctcagaccggtcctgggggccataaacgcccattgcaggcgcagttcccccgacccccgtcacgcgccccgggtcacacgggggccgacaggcaacggtctccagtcctgggaccgcgtcccggccgcctggaagccagagccgttggtccaaaagggagaacaattgggggtgggaggagtatctgagggacacatgggtcgggggaggctgcgccctccctgggccggtccccggatggtcccggctgtttgtgcctcgctgtcggaggaaggaagcgacaggaggggccgcgtgcacgagaggaaagcgcctccagactcggagaccccgggggtcggggcgcaggatgtgaatgcaggcgcggggcgggagccggggctgcatcctgaagtggggggcgggggcgctggggcgcgtcccaggccgtgggcgacgagggtctgggagggttgggccggtgcacactccgcttccgtcccggcggcccacgtgcaggtaaagggtcgtacaaacctgggtcctggcggggacccagggctggccctcccgtgtcagagcaagggagaaaccgctgcggccgcgcagggcacggtcaggggtcccgggactcccaaaactccaggggttccggggctcccaccgcggcgccggacgggaagatgcccgggcggaaggtaaaatgagaccttccgaggcggcggcccgccaggctcccaaaagctcggcgctcggggcgctgggagccccacagctccgccctgcccactttcgagctccccgccctcgacccgctgcatcagctgttcaaacctggtaagaaattcaagacggcgacagcagagccctaatgaaaccaagcgcgcggtggccgcgaagccgcgcccgggcctcccgcacccgcgccctcctccccgcggctgggaatcccgcagccctctcgcccaccggccccggcccgcgcaggcagacggcatccgcgttctccccggggtccccgacgggagacggtggcggagacccgggcggccttcccgccgcgcccccgggttcaggcacccaccgcacggctgcagatggaacacgcgcctggtggccgcggccatggcacactcgcgcactcacggccgggctcctcacgcggcgctccggcgcttctggaccccaaactcggcgactcgggcgggccggcggcgggagccggcgacacacccccacgccgcgcctgggtcctaatgccgctcagacgccgcgcccgggcgcggtaggcagagctgccgagggctgggacccggccgcccgccccgcgccctcacccgcgggaggctgctccagccgggctgggctgctccccgccgcccgcagctgctgggccaaaccgagtagacccggctccttcgagcctgtgcgcgccggacccagcagacccagcgtcgcgagtttaggggctggacggggccggggagcttctgggaaaacgttcgactgcgccacgagcccaccgagctgtgcgactgaggcagaccccgggagggcttcccccgcgtccgctttaagtacgcggccggcccctgtctcctcctttcgaccggggacctccgcagggccacgcccgctggctgccccgcctcctgcatttatcccggtagctccggccgcaagtccttctcctcctcctccaggaagcgcgccccgactgactagacggacctccgtgcattccccgggctacgccctcgcccgctgagacggcgctctccgagctcggctgctttgggttttcgctgcgagcctcgccaacttatctgccagcctcttcacgtcctcggccttctatgaggtcaaggtcatggttcgccccctttttccttccccaaatggcccttgcgccctgtcccctttcctggaccggctgcgacccgcccggggacgcgccttttcggggcgcttagtctcctgcgagtagggcgtgtgcgcgtgtgggtgcgcgtgctgcgatgcgatccggcaaatgcagctgacgaacccctggcctgatccacggtggctcccagtagaaggctctacagcccttggaaacggaacacgcagctccgtaaagcgctaaccaacctcccgacccctccggccgccatcgctttccggctcagccgcgctgggacggagtcctcggccactgtgccctaaccatggtagaggaacggggacaggccggggcaagcccacctctgcgaaggaagggcttctggcgcgttggggaagcctcatgcatagattgggtgagtaaggctggcccagttctcctcccggcaagataagaacgcattaggagggaagcgctggagtgctcctcttggcgacggatggcctggggctctgcgacagactgagtaccccaccctcccccagcgcgactccaggaggccttgtggaagatcccaacaccatgacctgcaactgacttggggctggccacatagtattttagcaggggtgactctggagagacaccaggtcatcctgcgcaccccttgggacctttcctagacgccctccagctagagctccagtccaggcactgactcccgggtggcgggtggaggctgaggaagagctgaaggacacaggcggatgtcgcccccggagcatggctgcataggtggcatgcaggctggatccctgaaaagccaccttgccacccccagtctcccccatctgggaatgccttggcttctgcacctgctcccagcagctcccaaacacctggtccttccaacccacttgttccaggaaagcctctgggatggagggcgcttccccttaccacagtctcctcagcgctcctcaaaggacctaacccctcagcccactgaggaaagaggagcccatgaccaagccgcccctagtcggctatgggccccctctgtccgctccctgaccgtctctcaaaggaactggcactgagcccttctctgctacacctgtgctctgcccctgcggttctgttccctcggccttcctggagggaacccctgaggcccacacgcctgctgcctccagactgaccgtttcagaggctgtttccttcagtcctcccacctgcctcctgtcctgtgtagatcgtctgacgctgaaggcaaatactggtgccccagatctcctgtcctgtgccccactgggtccttacataggcaggcaggttgagggacccagacgcaggcacccactttccctctcattccctcccttggggtctcagactttactgggctgtggacttgaaactgtaaccgctgggttccacaaggcgcacttaacagttttctgctgtcctcccctgatgccacttatcttgcctgtggattgtagaatctggggtctgaagtaaatgtataacatctcatttttaggccgggcttggtggctcacacctgtaatcccagcacttcgggaggcagaagtgagaggattgctcaagctcaggaattcgagaccagcctgggcaacacggtgaaaccccgtctctactaaaattacaaaaacttagccaggcatggtggcatacgcctgtggtcccagccactcagcaggctggtgtgggagaattgtttgagccagggaggtcaaggctgcagtgagccaagactgcatcactgcactccagccgtggtgacagagagaaaccctatctcaaaaaaaaaagggctcattttaaaaacaaaacattccccggccgggcgcggtggctcacgcctgtaatcccagcactttgggaggccgaagtgggcagatcacaaagtccagagatggagatcatcctggcaaaccaacatgctaaaaccccctctctactaaaaatacaaaaaaattagctgggcatagaggcgcatgcctgtagtcccagctactcgggaagctgaggcaggagagttgcttgaacccggcaggtggaagttgcagtgatccgagatcgtgccactgcactccagcccaggcgacggagcgagactccatctcaaaaaaaaaaaaaaaaaaatttcccttaaagccccttgccctccgggtgctgccttatccctcagctacatttaagaggaagtttctccagagctccatgcccctcccgctatgtctcttcaaccgactcatacctgtcttttgtccccaccacaccactgaaactgctgagactccatctcaaaaacaaacaaacaaaacaaaacaaaaaacaaaaagtaaaccaggtgcggtggcacatacctataatcccagctactagggaggatgagatgggaggatcccttgagcccaggagtgttgagaccagcttgggcaacatagggagacccacccatctcaaaacaaacaaaaaacccaaaggaatgttaaaggcagatatctccatggaggcatttcaggcctatgacgccctcccgaagctctcttctccatcctccatcctccattccactcaggctttctggtctagcctaatgggcatcccagccagatactcccgactcccctctgcctccttcctctcaccctggatggccacatttcactgagtcattttatttctttgatttttattttgttgaggcagagtctcactctgccacccaggctggagtgcagtggcacaaacacggctcactgtagcctcgatctcctggcctcaggcgatcctcccacatcagctgggactacaggtgtgcaccactgtgcctggctaattttttttttttttttttttgagagaaatggggtctcactctgtctcacaggctggagtgcagcgatgcaatcttggcttactgcaacctccgtctcccaggttcaagtgattctcccgcctcagcctccccaggagctgggattacagtcatgcaccaccatgcctggctaattttttttttttttttttttttgaaacagttttgcactgttgcccaggctggagtgcagcggcgccatctcggctcactgcaagctccacctcctgggttcacgccattctcctgcctcagcctcccgagtagctgggactacaggcaccagccaccatgcccggctaattttttgtacttttagtagagatgggatttcaccctgttagccaggatggtctcaatttcctgacctcatgatccgcctgccatgcctggctaatttttgtatttttggtagagggggttttgccatgttggctaggctggtcttgaactcctggcctgaggtgatccactgcctcggcctcccaaagtgctgggattacaggcatgagccactgtgcctggcatttttttttttttaatttttgtagagatggggatctcaccatgttgcccaggctggtctcaagctcctgggctcaagcgatcttcccacctcagcctcccaaagtgctgggattacaggtgtgagccaccgtgcccagccttatttttatttttttatatttatttattcattaagacaggggcttgctgtgtcgcccaggctggagtgcagtggtgagaccactgctcactgcagcctcaacctcccaggttcccgcaatctgcgcacttcggcctcccaaattgcgattacaggtgtgagccacggcactcagctgagtccttttatttctacctcgggtctgcagcatcctggctgccatagccttccttggacccttggcaggcatggcttcccatacctcgcagccagccgctctctctgaagtcactgggattttaccagcctcttggggctcccgctgccttgaccggtgttctcagcctctggtagcccttctccagctgcagctgctccgcctcctcgctgttcctggggaggagaggtgctgttcccacgctctctctctatgattgaggacttgtcatctgtaatggttagttatttatgggagccctatgtccagctctgaaccaggccaagtgactgggctcagctgcccactgaatcaactgcctgatactccctggtggtctaactggaccccaacaatcatgccagtctcctgttcccctccaaatatttttaatttttttagacagggtctttctctgtcacccaggctggattacagtggcgcaatcatagctcactgcagccttgacctcctgggctcaactcatcctcccacttcagcctcccaagtaggtgagactacaagcaggtgtcatcacgcctggctaatttttttattttcaaaatttttggaaaagacggccttgctgtgttgcccaggctggtcctgaacacctggcttcaagagatctcaatctttgtttagactgtcttcccccacgccataactcttcctgtcccgtcagcttttgctttctatccgtgggagcccagcatgagactggttgtcctggtaatgctgcagggtgctgggagggggaacatagcctccactggcctcctctctttcctggggggcatctcccggccccttgggtaggtggaaggacaaccctttggtgctcaacaaacacagcaataagccctctctcagttgccatctacccctactgagagaaagatccaggctactataacataagggcatccaggagggcaaggagcccctgccctgcagagggtcaacaaggacctgctaccctcaggatggcatctgtctgccccgcccctcagtccatactcacagtccaaagctagcatgggcaggagtgggctagggctcttggctcactgattctaagagctcatgaattccaggcatacagactgtcaaggtcttgtggcaggcatgcagcagaccactgggcaggaagattctggggctgccccactgccctcctgtcaggcctctctgccctccacagcccagcctctcacaaccaaacactggcttccttccccaccctcacctacccccaggccctactccatcaaaatcccatcacctgctacccaaggaagaattctacctggtgaccctaaggttctctgggtagactgtcacctcctggccatccttggccaatctgtgtccctcatgtcttcctcacccatggctctcctcgctggtccccatcctgctcaggggcctggatgtcaccattgggggctgatgtggcctgagaccccatccaggtcaccctcctctccagccccaactcctcccaggaatttggaggcacagggaagagagaggtggtggggaggcccagggcaacaccctggagcaagacctccagcctctttagatctctgatcgttgttatctataaaacaaataagctggaatggagttttcgtagctagaaaattccatgaattttgtctcaaactgaaataatcttatcaaaccatctttccagttcctgttgtccttatttctctatttgtacattcatccaggcatgaaatttcagagtagagatgaaaagtttcttaaacatgtccagtcatgagaggaaaacaaaaatcacactttattgctgcaggaaaagcagtagtaatttgtgggataaaatgaaaattattcacactttatttggttaatatatatataaatatattttacagatttacagtcatttatgagtaggacataaaatttattgaatctgatgtaattttttaaaaaaccaaactcttttagctggtcaatttaggaatgcagaggcctgggaaaaacaggaataatttgtggataaacaaatttatttttcatcaaatttttagagatgaaacaaaaaaagtatttggatttgtttcaaaacgttgggttttttccacttgggctttttccacttttacctcgaggtcatctccttagctgttgcctagttagtcatggtcttgtcaattgttccttcaaaatggctctccagttggtccacttctcacctccacccacgtggagcagcagcccattccccacatcacagtctatatgacctttctttcttcttttttttttttttttttgagaaggagtctcgctctgccacccaggctggagggcagtggcaccatctaggctcactgcaacctccacctcccaggttcaagcaattctcctgcctcagcctcctgaggagctgggattacaggtgcccgccaccacgcccagctaatttttgtatttttagtagagacagggtttcaccatgttggtcaggctggtcttgaacccctgacctcgtgatccacccaccttggcctcccaaagtgctgggattacaggtgtgagccaccacctccggcgttttttttttttttttttttttttttgagatgaaacctcgctctgtcgcccaggctggagtgtgatggcacgatctcgcctcactgcaacctccgcctcccgggttcaagtgattctcctgcctcggcccccgcgagtagctaggattataggcacctgccaccacgcccggctaatttttgtatttttagtagagacagggtttcaccatgttggccaggctggtctagaactcctgacctcaagtgatgcgcctgccttggcctcccaaagtgctgggattacaggtgtgaggcaccgtgcctggctctacatgacctgtctttttctcttttttcttttttttgacctttcttttgtttaagaaaaatagattctcagacaggatcccatgatcactggtatccctgggttgtgctgaggcactataaaaccaaacaatgggctgggtgcagtggcttactcctgtaacatagcactttgggaggccaaggcaggaggatgacttgagcccaagagtttgaaacctgcctgggcaacatagataacatctctacaaaaaatgcaaaatttggcccagcatagtggtgtgcacctggagtcccagctattcgggaggctgagtggggaggatgacctgaacccagggaggttgaggctgcagtgagctgtgatctatagcctaggctacagagtgagactctgtttaaaaaaaaaaatgtaggttagctgggtgaggtggcacatgcatgtagtcctagctactcaagaagctgagatgggagattacctgagccccaggaggttgaggctgcagtgagctataattgcaccactgcactccagcctggacaacagagtgagactctgtcttaaaaaaaaaaaaaaaaaaaaaaaaaaaaaagccaggtgtggtggcttatgcctgtaatcccagcagtttgggaggctaaggctggtggatcacttgaagtcaggagttcaagaccagccttctcaacatagtgaaacccctcctctagtaaaaatacaaaaaaaaaaaaaaaaagttgggtgtggtggcatgtgcctataatcccagctacccgggaggctgaggcagcagaatctcttgaacccagggggtggaggttgcagtgagccgagatctcgctgctgcactccagcctgggcgacagagcgagactgtatccaaaaaaaaaaataataataataaaaatcaagtaggtgtctgacttatcagaaaagctcagaaactgcagggagatgcgtaatgctggtttaggggagcaagccgttctgtggggggcccacctctcagatgggcctggtatggagacccaaggccaggctaatcagaaaactccattcctcctgaccatggtaattattcagggatgagaatgtgatccttgcctatgggaccctggtgctgctggtggtgtaagggaagcttgctgcaggggaagaatgaagccaccgaagatagagggttctgatgacatactagtgcctgcgcctggctgacctgtagctggtactagtctggactcctgcagaaaccaagctgatctctttctgtcatgggctggaagtgggtcacatggtcatgtcttctttgggtataacttttccctagagtgtaggatagagattaacactggtgtttctctgtgttccttggcgggctctctgattttcagcagctccacatgagatctgctctaaatcacttttcacaatcgactctgccaggattccctgactctggggctcccactctggtaagcagcactagggtttcagtagtcccctgtccctactgagagctccaggtggaagatgggatcctttccccatcctcaggtttcctggcctctaagtccctctgagagcccttcaccatttactgtctccccatcgttctggcaattcctaggggttaatccccaaaccctagaggttttgccgtaatgcaaccgcaggcgctccatcaaagttcaaaccccggcctgcaggatggggatgccggaggctctggggaagaggttgtgaaagggtaacactgccgccagccccctcccccaagtctaccaggcccttcccgtgcagatttgcatttggtttgcacaggactaatttatctcaaggaacttccaaacctaagaccaccatcccaatcacctgaagctatctgcggaggctacaccctttcccccgggccagcttccacatctgcccagtggggcatttccccttgtcccacccagcgactggttgacaggaagcagggtgtctatggactggcggcgggcgccccttttcctcacctccctgcgcggccagcgggggcccggggtgtggtcaggtgggaggcccgcgccacgtgcggcaggaaccgcctggcgagtggaacccgagcttgcacggggacagctgatgcctttctggtcgctcctctagagctccgcgggctccggcaaacccccccgttagaacttgcggttccaacgcgcagcgccaaatctggcccttacttgacccgtcagcgcctccagtcgtccccatgtataaagtaggaccgaggagccacctcgccaagctttcactgcgcggaaacgcgcccatcaggctggaaaggcgtggttcctactacagctcggccgcggcaggctggggccgagaaccggcacccgtgcacggcggactaagacgagggtgagggacacgggtgggccgggagagccccgttcccatagccggcttccttgagcccctccccaagttctgggactccccaagttcccaccccgcaagccagtgtggtttcttcagatgaattttattcttactctccacgggctgctccggcgtctagggagggagtgtgagctccgaggacttcccgcagcatccccaccagaggcgtccaggggaggctgagggccggcccccgtcacccccgccccaggagcacacgggactgagtgtatggcacaggcatcgtctggaggccttgcttgttcagtgatagtttattggtccttagcatgacatctcgattaccaaggtaaattcacatacacaactgcaggtaaaaacatgtaaaataatataaaaataaattgaaggctacttttatatatttactgaattaagtagtgtaataaatactatgataagcaaaaagcttcaatcgcacaattcagtttcactgaagttacagtagtgtttgtaaatacgagttttaaaatttaagttacaaatattaaagcactgaaaaactagtataaaagtgaattttggcacgtaagtgagctcttatgtcattagtatttgacatcctgggacaatgaggaagccagttctcacctacttttttgaggtacaactatccaactagatcagcaacacggctggaatacttcgtagtttacaatctttgaattgaacttttcccttttgagaagcccaaggagcaacccagagcttcttactgtgcaaaaattctccaaaatcctaatagaatttaggagggaactttttcttgcgacctgaagggcccagtgtccaggcttcaggtcagatagcccccagggctcagaggggccggctcaactccttgccaacggcccttccctaggataataatcccatttcctccaatttctgtctccttcttccaatcaaaaacagaaaaatcccatgtaaaaacataaaataacccgtaacttcagcgacttcaacattatcccacgcactctgggtgatataaactgaagctgctaataggaaagttagcaaaaagcatgtaagccccgggaggactgcctgtccctgggaacccacccccgctctttgctgggtccctggatccacttctaaggtcaaaagcagtgtcatggccattcctttggaaacagcagaagaccctgctcctcccacctggagcgccgcctggaggaatcaagtggatactgaccttcacagaacagagaggcctggcaggttccaggaggcatcccctggcctcagtcctcaaagagctcacagtgcaccgcgggtgtgccttatcagtggggcagagcaagtggccccaggaatgccctttcgccagctgccccttcacgttcccgagtaggctgaggagcatcaacagaggcctcagccagttttgcctttttggctttgatgcttcttcacgttttgacttttttcaatcacagtttcatattcaagttgaggtaatcacagttttttctctaagaggagaggagttgggacagtggggcaagttggtgagagagcatttctgtgaagagaaacaaagaccaccacgtagtacagccccacatggtgagaagacccgctctcacgggcgggctccgacccctctttaaaaactcttctgcagcagccagactgccaggccagtgcagtcaggaaatggctcaagctcctaaagctagagctttcatttaaaacttcacagcagcccacttagagaaatggcctgtggttcccaccccccaaccccttttctaaggctgctcaagtttgagtttttaaaaagagttcggtagagctaaaggaagctacagtaactcactgcttattaatcaattgcacttaagatctatgttactgattctgaagcgaggcaagcccttgacggaccgcagcctctggccagccagaagtcagggggctcccagacttaggttccacagtggggcccttgtcatcagtggcttttggagctgggactggagcacgtgggtcttttcagaagcccttcttgatgcaaaatttcttatcaatggtatctggagttttgttcatttggcttcaaattgttttttttttttttctaatatattttactgacaagcccttgagagctgctttgctacttgcatgcaggcctctgtgtgaccaggcacacagactacatgtgctccatcttgtctctccgctgctccaggggccttgctcaaaaaccccctatattactggaaactgctggttttacctatgtgcttcttcctaaggcatgcaaaaaaaaatatgtgaaattcagaaaacatttacagttcaggcagctgaggcactgaagtcctaagagacatcacctaaatatcagtggctgtgactcccctgtcccccacaccaattatgaaggtcaggcatgggacacacttgtaattcccctctgctttatggtccagcttaaaacgatgccattagaaggaattctaactcaggtattgcaattatttgaaattcccaatcctcaggagccacacaagcccagggccagcaacaacactttggggagcggggggatgagtttcctgaagtttgtggctgaaaagcaggccttccttggcaaggcttgtgggagcgctgggtgctggagactgaccccacaagtgatcagccaccaggcctaagactaaccagctgcaggacgcccccttccacagtgaggtgaagcctcgccagggggcctgagcagcaggcttgctcttgtccctacattaggacacccgaatggtgtgacaggagagctaaagaaccacccacaaggggaaaagctgatgtcaacttaagagccacacacctctggaaagcaacaagcctctccttcagtttagtccagaagggaaatcccctcatttgtgaacacatcattcatctcaacccaagctgctggctctgtggactgggcctgggcaaggctgtgctgctcctcccaggactgggcccacggccagtacggccagctccttcagggaaacgggcctagcaggggaggcaggcactccactggggaagatggctctcgtggagcagcatctgaggcttgaggcctgtcgtggcctcgcctcccagacacggccacagttcaggcagccagggttccttctaagtcccagtagctcctctgtgtaatcctaatgcttctccccaacctcaagagcccaaaggagatcctgttatcagaaacccagagctcctggactgccagttgcacacgtagacgggcaggccccatctgctcatccttgagtattcccccgacccccaaaatcaatggtgcaggtgatgctcttcagcgctatacagggaataaagacaacatgcactcaagccagcccacacaggccaaggagaacaaagacagccccttaagggagaggcctccagcagagctgaggttaagacacccgttcgtccatctccaaggtggacattctgcaggacgtacgggcccagccttcctctagggcttcagctcaaagaggtcatgatactcctgctgttccagctcctggttatacttctcaatttcccggttggcttcttccacgtagtcattcatgaactggtccatgactggtatctcattaaggaagagagctctgagcctggaggacaagggaggctgcctgagcccagagcggcctgtaggcaggtgaggggggtttgctgaggaagtgagtgtctggcccatagagagggaacctgatggactctttgtatatactggcagcaccacagctacaaagaatgcaatggctgttgtcacagggatgttaatgaggtcctagaactgagcccttcagcttcagccctatccatcttttcacaggttaactgttgtaattaggctgtcttcgacttgtaaatcgtgactctgatgacgacagacttcaggatatcaccgcagctgcatccaaactataactcacaggctgggcgcagtggctcatgcctgccatactagcaatttgggaggctgaggtagatggatcacttgagcccaggagtttgagaccagcctgggcaacatggcgagacctagtctctaagctgggcgcggtggctcatgtctgtaatcccagcacttcaggaggctgaggtgggaggatcacctgaggtcaggcgtttgagaccagcctgaccaacatggagaaactccgtttctactaaaaatacaaaattagccgggcacggcggcaggcgcctgtaatcccagctactcgggaggctgaggcaggagaatcacttgaacctgggagacggaggttgcagtgagctgagattgcgccattgcactccagcctgggcagcaagagtgaaactccatctccaaaaaaaaattaaaacaagacaaaaccaaaaaactataacccagagtcacattagcaatcactcaataaaggagcaatttaactttaacagctttagagactgaaatgaaaagttcgcccctgaggtttgcccctgtgcattcctgacccatcagtggacatgcagagtgctcctggggctcaaatgcatggctctggcagacaaccgctttgcagacagggtcacacactcccagcctcactgcccgggttccacacagggaccacgctgttccaaggatacgtgggtgaaaatcagttttgtcaccaaagaagttaacaaattgggtgccattataaaagtagcctgcaggtaggggttccaagtggcgttttacctgtaggagaaaagagacctgtaataattatctgactactttctatacttcactcactcattaaaacaaacaagtctatttccctagcaagatagactactctgctatacagaggagctaggaagctaacacccccggcaaacctcaagccctgcctgaggtggttccccacctctcaggtgaggagctctgggaggtcctagtgggatgaagttcccacggtgtgcagtggtactgatgtgcaaacacactcttttatttatttatttatttttttgagatagagtcttgctttgtcacccaggttggagtgcagtggcgtgatcttggctcactgcaacctccatctcctgggttcatgcaattctcctgcctcagcctcccgagtagctgggattacaggcatgcgccaccacgcctggctaatttttgtatttttagtacagacagggtttcaccatattgatcaggctggtcttgaactcctgacctcaagtgatccacccacctcagcctcccaaagtgctgggattacaggcgtgagccaccatgcccggccacaaacacactctttattggctgtttccccctctcctctttcatcctcctgtttcctatttagtgtctcctagaatcacttccaaaataaactacctgtacttaactccttgttcacggttggctttcaggggaacatgcattataaggactaccttatgcccatgttgtcctccccaggagcacccaggttgtccgggcctataggagctgtttatgaaaggggcctcctcaaatccaaagcaggggctcctggagtcccagaatactttcctgccccacctgctcattactggcatcctggggacctagactctgtgtcctttttagctttttgtccccaaacccctcaggaaaaggccccagtgagcatggcgactgaagcagaggctgggggtcagagcctggaggctgggaggctcatcaagggggtctctcaatcagcctcttatcctggcctcaggttccacagccttcctatgagcagcctctggatccagacagtttttgcctgggctctagctggttcatctgtaacataggtcttctgcagttgcttgaacaaggtgccaaggcagggcttctggtcatcagcttctcccacaagtactggctctactcaatctgatgcccaggtcacaccagaggtctcctgtgccctcctcactgaggctgcaaaggccagaattctgtacgcagcttccctctgtggcctgggagaagcaagacctccagcatgtcctacaaacagctcctcactcagagaatccaaaatacagagctaggcaagccgaggacagccctgggccaccgaggggagaagccagggcaaggcactcacgtggatgctcctgatctcctgttgcgtcagcatccccctggtcttcagggctttcctctgaggcttctgcagagatggggagtggagggtcaggtcccagcagaactcatggagtgcatgggcaggggagggctctgggctctattacacaactaagatctcagcagtggggaaagcacgtgcgctatggcctggatataatattctgtctagtctgctctttgagaaaaccactttcccatcacagagccctgtgagccagcagggaacaagcagcagaggacagcccagtgttttcgtaaatgggaatggtcgtgcctctttgtagattcttatccctcaaccctaccaatgagaggcagacaaaggggcagtctgaggccccacagtcaagaaccgtttagaagcttatccaagtgaggcagcccatccctcagcataaagacaggtccctagtgagcatctgcagaagagccaggccccagctaactctagtcccagagttctaggatgaactaaacccccaaggctgtgctacaaggcttagcacccaaaccttgcagagaacctggctcacaaagcaaacaacatagcaggcctgcctggagtttgctctcagtggcttcctccctctctcaaagtgtccctgcaagtgctggctgggccagggagaggaagcccagtggggaggcatcagggaggcagtggcggggcttctcagggccaacagcagctctgaggtgtctggtcacatctgtgtcaggtctgtctgggctctggaaaccacctgcttagctgactgccgcagccagtccttgatgctgtcttccttcagggagcagccgatgaacacaaggtagcactcctgctgcccgctgctgtcttgagatacgcttttggagtctggtggtggtgtgggtccttccaaaactggcatgatgctcaaggagttggccagtgtgttgtagcagacctccatggtcctctcagagtctgtaaggagaatacacattagtccctgagagcctgccttgaaaggatacagctatgctaagactgtgacaatgcagatggttgggatagattcatgagaaaatgcaagagacagaactgatgtgactggtggcagcttagaaaggatggagtaggtgggcacagtggctcatgcttgtggtcccagctactcaggaggctgaggcaggaggagcacttgagcccaggaattcaaggctgcagtgagctgagattgcgccactgtactccagcctgggtgacagagggagatcccattttgttttgttttttaaaaaggaaaagaaaggatggagtaagagagagagacagagaggaacaaaataagtttctggcttggctgatctgggtgatcaggtggacactattatcccagaagggaaacacaagagaaaaaaaaggtttataggtgggagaagaggaagagtttgactctgcacttgtggcatttgaaagtctctaagaccctgagcgtgagacatccacatagtccctggtggttgctggaatagctgttatggaagaggtggttgaggaaaagcaaagaaacccccttggtagaagtggggggctctcagcagaggcctcagaggccaagggaggagggcacagccaacagtacaacaaaaaaattagctgggtgtgatggtatgttcctgtagtcccagttacttgggaggctggggtgggcagtgacctaggattgcactactgcactccagcctgggcaacagagcaagaccctgtctcaaaaacaaaacaaaacagacaaaaaaaccagtacagcagtgttgcacgaaggtcacacagatgagaatgggaaaaagtgttacatgctaaggagatgagggctaggagtgactggagacccaagaagtgggcaagggctccctgaaaggcaggatgagaaaggatccggaaaaaagcgaggttaaatttgaacaaaaaaagagtcaatagcagatctaaataaacaagaggctgggtgtggtggctaataccttaattccagcactttgggaggccgaggcaggaggatcacttgagcccgggaattcgagaccagcctgggcaacatagggagaccttgtctccacaaaaaagaaaaaaaatcagccaggcatggtggttcacgcctatagtcccagctacttgggaggctgaggtaggatgatcgcttgagcctgggaggtcaaggatgcagtgagccgagatcaaaccactatactctggattaggtgacaaagtgagacattgtctcaaaaaataaaaagaagaaagaaataaaaatatttatttatttattttattgagacggagtttcactctgtcgcccaggctggagtgcagtggcacaatctcggctcactgcaacggccgcctcctgggttcaagtgattctcctacctcagcctcccaagtagctgggattaaaggcatgtgccaccatgcccggctaatttttttttttgagacagagttttgctcttgttgcccaagctggagtgcagtggtacaatcttggctcactacaacctccatctcccaggttcaagtgattctcctgtctcaccctcccaagtagctgggattacagctaggtggtgtcctacagtaggtgggtgtccgccaccacacccagctaattttgtatttttagtagagacagggtttcaccatgttggtcagactggtctcaaactgctggcctcaaatgatctgcctgccttggcctcccaaagtgctgggattacaggtgtgagccaccgagcctggcctaattttttttattttttgtagagatggggtttcaccatattggccaggctggtctcgaactcctgacctcaagtgatcctcttgcctcggcctcccaaagtgctgggattacaggcgtgagccactgcacccagccaaaaaagaaataaaaaaaaagaagaaaaggaggtgatgggtgagagggaaaaacaaaagtaccaagacctctgaagcagcaggggctggctgttggagcctgagattagtgggcttgggtgtggggccgaagtttctgatttgatcacataaatcaagcaaaagctatgagctaaggacccatgtaattctcccatctgaaccatgatggttctatgcttggagccctcagtggtcccctacagcagaaactgatagctgccgaccccccatattgtctccctcttcttccaataccaataccccatgggtgatgggtccagaaaggcacagcaatccaatgagataagtcggcagagaaattgggggaggcgctgcactgacaaaggcacccacaggaagagccagcctctcctcattggctggatgcagtgtctggctttgacacccagacctgtagcaccacttggcaaccataaggggcaggaacctgaaagacaagctgacacaccaagaaggggaggacacgaagacatacatcacctggctcctcagtggccttgctctgctgcttgagcgcctcacttgttatacagccaacacctgctagctgagtgggggttctctgtgataacagctgaagacaccctaacagacgcactccctctctccctactcccaggctccagttacggtaaatgctttttggttcctgaaatgtgtcttttctgcctctggattatagcaaatgctatttccttcccctggaatactgtacctttcctcaacattgagttgactgactcctactggttttgaggccttctctgatgcccactccaggacagcaagggctccagaggtctaaactgatcctcaggcctactagtcagaagagaggagaaggcaaacagaagctcaaagactttggtcagaaatggatctagagctgaagagctcagcactggggcagctcctggttttaggtctagaggaggccatgactggctcaagaggtgtggagtgtaaggctctgaacaagaaggtcaaaaagctgtgagaagagcccctgagcaggtcatccaggcgaggagggcaaacctctgccatggaacaggaggacccagactaagtaggcccttggcggagaggggtgatggacaagcctgatggcgtgaaggcccagggtggggaaggtttctgagagtctgagcagcatcagtggtctgcagagcaccagcagaggctctgaactcacatcatgagatgcaagcactccatggtgtagagctcccaaatcccagcccctggttacctgaaaacttcactttgcccaggatgtggtagatgtttccggagaagggacttggcttgatggaggactgaattgctggtggaagaagaggacagcgctgtcacccacatggaggcacaggccaaattcaggacagcacagctgggagttttagggactggggagggaccatacaccagggtctagggttcacaggttctacccgccacaccctgttgctcccctgtggctctgccactgttcccaggggagggaaaaccctttcactggagtggagaccaaattgtgtgaccacccacaatcctcaaatccctctgtctacttttggtttcaaaaggtaagaagacatacagcacatagaatactgaaatggtaccaggaggcagaattaactctgggacaccctttttccagtgtctaggacatctcagtcaaggcttacctttacatttggccacaaagcgagtcttctccaagggacggccaaaccatacgcagatctgaaccattaggggatagactgatccagcattcaatttaccttcataccttaaaaggtttaaaaaattttaagtacaggccgggcgcggtggctcacgcctgtaatcccagcactctgggaggccgaggcgggtggatcatgaggtcaggagatcgagaccatcctggctaacaaggtgaaaccccgtctctactaaaaatacaaaaaattagccgggcgcggtggcgggcgcctgtagtcccagctactcgggaggctgaggcaggagaatggcgtgaacccgggaagcggagcttgcagtgaggcgagattgcgccactgcagtccgcagtccggcctgggcgacagagcaagactccgtctcaaaaaaaaaaattttaagtacaaatatttgaattctcccttacatctatgccattttgcacacaaaaacttgtttaaatatgtatatgcctctttcattttgagactgggaagcatgactgcccagttaaatcaggagctgaggatgaaggttttacctaaccttagactagcagttccttgatgtcaaagaccctgtgtacctctgaagcctcccagtccccatctgagtttgggggtccttcctggtacggtggggggctcttgctcaggatgccctcccatttctctctctttttttttgagacaaggtctccctctgtttcccaggctggagtgcagtggtgcgatcttggctccctgctatctccgcctcctgggttcaagcaattctcctgcctcagcctcctgagtagctgggatcacaggcgtgtgcgccaccacacccagctaatttttgtattgtttgtagagacgaggttttgccatgttggccaggctggtctcaaactcctggcctcaagtgatctgcccacctcaacttcccaaagtgctaggattacaggtgtaagccaccatagccggtcttgctcccatttctttaagggctccaactatgccccgccattttgttgcaggcagcataacaggttgtacatatagatgtgtacacctgtcacagaaggaactggggcatctctgctctattttctttgagacagggtcttgctctgttgctcaggctggagtgcagtggtgtgatcatagctcattacagccttgacatctcaggctcaagtgatcctcccacctcagcttcttgagtagttgctacgacacatgccaccatgcccaactacttttgattttttattagagacaaggtctcactatgctgcccaggctggtcttgaactcctggcctcaagtgatcctccctccacagcctcccaaggtgctgggattatagccatgagtcactgtgcctagcctgtttcctttattttaattaattaattaattaattttattttatttttttgagatggtgtcttgctctgtcacccaggctggagcgcagtggcacgatctcggctcactgcaacctccacctcccaggttcaagcaattctccccctcagcctcccgagtagctgggattacaggtgcccaccaccacgcccagctaatttttgtatttttaatagagatggggtttcaccatgttggccaggctggtcttgaactcctgacctcgtgatccacccaccttggcctcccaaagtgctgggattacaggtgtgagccaccgcacctgcccctgtttcctttattttaaaacagcactgcaattttaattttaaattgttgaaagtatcttattcttcttaatttctttaaagaaggtagtaggcataagatttttgcaagactgacctgtcttctccccatccaaacaagtcattttggagactgggggtttctctggcctctggcttctgtggtacctgaatccttaggggaatttgcaggggctaagggaaggcagcaaggtttctgcccaaactagaaacaagctgttctaccagaaaatgtggaaggagggtggatgcgaacagagaaggatgtgggagggaagtggcagagaatgtgtgcacagcacagagcggagcatatcctggaactaaagcccattcactctgaggtggtggctctgacccacgtgagaggggagtaatatatagagatgagtaggagactgatgactgccatcttgttaaagatgaaattatctgattcctagaaatggacttaggagggggcctgaaagagaattttggggtccctccatctctgattctctataaggactgatcttcctgatgaggaaaaagttcacattctttttttttttttttttttgacacggagttttgctcttgttgcccaggctggagtgcagtggtgcgatcttggcttgctgcaagcttcgcctcccgggttcacgccattctcctgcctcagcctcccaagtagctgggactacaggtgcctgccaccatgcccggctaacttttgtatttttaatagagacggggtttcaccatgttggccaggctgatctcgaactcctgacctcatggtccacctgccttggcctcccaaagtgctgggattacaggtgtgagccaccacatccggccagattcacagtcttctaatgggcccctcttaccctactctctcctggattagtctgcctccaggtgtctgggccctgagctagcttcttgtgtatgagtcagtaaggactggagaacagcacttctctaggcacctggtggtgattacaggagcctcatgacccagaggttcaggcagcaagagagtcagtggctgtagccactggaaagaaggttcccccagaagctccatttgtttatttttagctaagatatcattatcttgttcagacataagaaatgacccacttactcactgtttaagtatgacatgattcaaatcagagattccttctaagaatatgcctgaaaacatttaattttacatactgaccctctgggatttttttggttttgttttttacagcatagcagatctttttttttttttttttttttttttttgagacggagtctcgctctgtcgcccaagctggagtgcagtggcgtgatctcagctcactgcaagctccacctcccagcttcacaccattctcctgcctcagcctcccaagtagctgggactacaggcatccaccaccacacctggctaattttttgtattttcagtagagatggggtttcaccacgttagccaggatggtctcgatcttctgaccttgtgatctgcccgcctcggcatcccaaagtgctgggattacaggcgtgagccaccaagcctggccagatcattttttgttacgaaaaaagttggtggtgtaaggggtggtatggaggatgtagagaggtgcttgggaaaagtgagtaagaataacaaagataatccaaataaacatgagagattaattctggccaagctttaacaatgtcttcccctaaaccttcaacagagcagaaacaaattgtccatgctatacaggaataagtgtagcacgatgcctaagagaaaaagctctgagccattcaacctgggtttgaaatccagttctttcatctactaagctataaattgtcaagtcattaactctttgctgcccctggtaccttatctgtaaaatgataaaataacggaatccacttcacaggattggtgtaaatgagacaacacaaacaaagctctcacaacagcactgttcaacagagccttctggggcaatggaaatgttctagatctgcactgttggacacggtagctgccagccacaggaagctatgaagcacttgaaatgtggctgtgtggctgaaagactgaattataaattttgatttttattaatttacatttcattaaatagccatgtggctaggagctgccatatagagagtggagtctttgaacaatagctagcacacacagtaaatgttccagcgtgttggtattagtatgattacagtaactttgcagcacactctctcctttgtcctcttctcctctggagaggtccacaggctgtgcagcatcctacagagaacattccctgggccatatgagcagggaacccagcagatgggaaccctagaggactgactgacggtattgtcagaagcgagtctcacctgggaaagttatagctccttggttctgtgccaggcactttgccctcagtaggggctggaggaacacagggcacagcggtgcttgctgcctacaggatgattccctaaattgaaacatctaagaaggctcgcagtttggagcccaagaggtggagcactgggctcctggcaaggccagcagctgccggacaggcaggccgtgccagctgccatgtgtcacccttgcaaagcacatctggtattttcaccttctctctttttttttttctgtaaataaataaatcattgggtttacaaaaaaatcttagttatttttcaatgatgatacttgccagccaggatacattaaatatcgagatcgtagcatctcaggacttgaaaaactgttttctgagagaatcagctcaatgtcttcattcctttgaaaacacacagaaaagacctagattaattaggactgtcaatctcttttttttttttcttgagacggagtctcgctctgtcgccaggctggagtgcagtggtgcaatcttggctcattgcaacctccgcttcccgggttcaagtgattctcctgcctcagcctcctgagtagcggggactacaggcatgtgccatcatacccaggtaatttttgtactttcagtagggacggggtttcaccatgttggccaggatcgtctcaatctcctgacctcatgatccgcctgcctcggcctcccaaagtgttgggattacaggcatgagccaccgagcccggccaggactgactttacctgcacgttttgtttattcttcatgtcccctaaatacatacaagcatttttgtttttttctgccaaaccaaatgaaaattagctgtactcatcatgatattttacccctaaatacttcagtatgcatctcccaagaacaaggacattctcttacagaactacgatatcatgatcacatccaaggaatttactggctcccagcaatcacctgggagcttgttagaaatgcagaacctcagcccccagcccagatgtactgaaccagaaactaattttcaacaagatctccactagagatgcatatgcaccacaaagctggagaagcatgaacatacatccactttcaaatttcccctttttggtgggggagggtccacgatccaatcaagaatcattcattaggccgggcgcgatggctcatgtctgtaatcccagcactttgggaggccgaggcaggcggatcacctggggtcaggagttcaagaccagcctggccaacatggcgaaaccccatctctactaaaaaaatacaaaaattagctgggcgtggtggcacgcgcctgtagtcccagctacttaggaggccgaggcaggagaatcacttgaacccaggaggtggagaggtggaggttgcagtgagacgagatcacgccactgcactccagcctgggtgacagagtgagactctgtctcagaaaaaaaaaaaaaaaaaaaaagactatgttcaaaagttacttgaattaaatactttttttggtgtggttgttattactttgatatacagatacattccttttttttttttttaattttgagacagagtttcgctcttgttgcccaggctggagtgaaatggcgtgatctcgtctcactgcaacctccgcctcctgagttcaagcgattctcctgcctcagcctcccaagtagctgggactacaggcacccaccaccacgccctgctaatttttgtattttttaaatagagacagggtttcgccatgttggccaggctgatcttgaactcctgaccccaggtgatccgcctgcctcagcctcctaaagcgttgggattacaggcgtgagtcactgcacccggcctaaatttatcatctttattctcctttaacctggaacagttcctctatcttttggttggtttgattctcatggtgttgatatttgagagtacatgtcagagcttttgtgtcccacacttggatttgtctgtttctaattctcataattagattcaggttatgcatattttgagattaatacccaggtggtgttgcatccttcccactgcatcacatcaaggaggtacagggtatcagtttgtcccattactggtctcactgagtttaatcgtttgttcaacataggtataccagacctttccattgtaaggtatttttccctctttgtaaggagtcagtagtctatggagtggtactttacacagtacaggactagtaatattttttttcttcaacagtctttcacctagtgcttttagcattcattgatcgttccctaaatcaaatactgtattagactgaaggttacaaaatgattattttctagttcttttgtttttgtttttttgagatggttgagatggagtcttgctctgttgcccaggctggagtgcagtggcgcggtctcggcccactgcaagctccgcctcccaggtttacgccattctcctgcctcagcctcctgagtagctgggactacaggtgcccgccaccatgcccggcttattttttgtatttttagtagagatggggtttcaccgtgttggccaggatggtctcgatctcctgaccttgtgatctgcccgcctcagcctcccaaagtgctgggattactggcctgagccaccatgctcggctgattattttctagttctatcaaaccttatttacttggtattcttctataaagggctttgctatcctgcccccttccaccttttttttttttttgagatggagtttcgctcttgttgcctaggctagagtgcaatggcgcaatctcggctcactgcaagctccgcctcctgggttcaagccattctcctgcctcagcctcctgagtaactggaatcacaggcatgcactaccatgcccggctaattttatatttttaatagagatggggttttgccatattggtcaggctgatttcgaactcccgacctcaggtgatctgcctgcctcggcctcccaaagtgctgggattacaggtgtgagccaccgtgcctggccccacctttgtttttgaggatcactgtggacacacattttattccatgtgttataattcatagttccagtattatcatggttctttcttatccccaaattgtcccaaattagactagcaggaacttcttaagctacttcccatatccttttgacacatctccactaatctttgagtacttccttgctttattggcataaaatggaccaggctcaccttgtactttccttgacctaggcatgcagtcagctaattctccaaggagtcctggtaccttgtagtggggactggtacttagaaaccaagatacagaggtaagggtatttgctgcaactgtggtattactattctggtccctttcaaaggaaaatggtaggaaatatacatttttaaaaataatgaatttatattgaatctccaattcaaatcaacatttgatctttgggaggccgaggtgggtggatcacttgaggccaggagttcaacaccagcctggccaacatggtgaaaccctgccactactaaaaatagaaaaattagtctggtatggtggtatgcacttgtaatcccagctactagggaggctggggcaagagaatcacttgaatccaggaggtggaggttgcagtgagctgagatcgtgtcacggcactccagcctgggtgacagagcaagactctgtctaaataaaataaaataaatatttgaagggtttttcttcatcttccccatttcatattcataatctcctctcttcaatcagtgatgttgtttagaaccagggttccagcagaggattatgttcaaaagttacttgaattaaatacttttcttggtgtggctgttattactttgatatacagataggtttactttttttttttttttttaattttgagatggagtttcattcttgttgcccaggctggagtgcaatggcatgatcttggctcactgcaacctccgcctcccaggttcaatcaattctcctgcctcagcctcctgagtagctgggattacaggtgcctggcaccacgcctggccaattttttgtatttttagtagaggcggggtttcgccatgttggccaggctgggctggtcttgaactcctgacctcaggtgatacgcccgcctcgccctcccaaagtgttgggattacaggcatgaatcactgtgcccggcccctttttttttttgagatggagtttctctttgtcgcccacctggagtgcaatggtacgatcttggctcactgcaacctctgcctcctgggtttaagcgattctcttgcctcagtctcctgagtagctgggattataggcatgcgccaccatgcccagctaagttttgtatttttagtagagacagggtttcaccatgttggtagggctggtctcgaactcctgacttcgtgatctgcctgccttggcctcccaaagtgctgggattacaggcgtgagccactgcacccagcctagattcgctttttttggtttgtatttaatttagttttttccctcctttatttaatttttgaatacataaaatatctacatagttcaaaagtcaaaactacattaaaaaggtatataaccttttatctgaattgagcaaacaaaacagctatataaccaggtgttttctcctcgtatatgtgtgtacacaaacaaaatcactaattctctatttttagtttgtaatttgaacccaagtccatgaagtaaagagataatatctctatgttacttttttttttttttttttttttttgagacagaggctctgttgcccaggctggctggagtgcagtggtgcggtcttggctcactgcaagctctgcctcccaggttcacgccgttctcctccctcagcctcccaagtagctggggctacaggtgcctgccaccacacctggctaatttctgtatttttttaaatatagaggcggggttccaccgtgttaacaaggatggtctcaatctcctgaccttgtgatccgcctgccttggcctcccaaagtgttgggattacaggcgtgagccactgcacccggccactttttttttttttttttaatagacaaagtctcactacttcgctcaggctggagtgcaatggtgtgatcatggctcagtataaccctaaactcctgggctcaggcaatcctcctgcccagcctcctgagtagctgagactacagacatgcacaaccatgctggctgtttttttaaaaaactgttttggtagagacagagtgtcactattttacccaggctggtcttgaactcctgcaaggagttttgggctccctaagtgctgggattacaggttgagccatcacatccgacccttctctacgttctctatgccatttctttcacactttaatacaaggatgttaagagaatcttggctaccatccttcaatggatgagaatgtgaatggatcaaaacaaaatgcctcaaaatggtacacgatggggtcttcttggtgatttttacagagcatctaaagcacttcggccaggcgtggtgcctcacgcctgtaatcccagcactttgggaggccgaggcaggcggaacacaaggtcaggagattgagaccatcctggctaacatggtgaaaccccgtctctactaaaaatacaaaaacaaaattagccgggcgtggtggcgggcgcctgtagtcccagctactcaggaggctgaggcaggagaatggcgtgaacctgggaggcggagcttgcagtgagccgagatcgcgccactgcactccagcctggacgacagagggagactccgtctcaaaaaaaaaaaaaacacttcaaaaactgttttttttctttttccaatatattttttctttttcgagatggagtatcactatattgtccaggctggtctcaaactcctgactcaagatcctcccacctcagccacccaaaatgctgagattacaggcacgagccattgtgcccagcctgctttttttttttttttttttaaagagatggggtcttgctctgtctctcaggctgtggaatgcactgacacaatcattgctcactgcagcctccaattcctggattcaagtgatcctcccttctcagcctcccgagtagctgggactataggtgcgtgccaccgcacctggctcaaaaactgacttctccaaatgtttaggtcttagatacagtagaaagactctgtgggccacagacagagtgctgtatctgagaaagcaactggtcttgcagagtgaatctatagattacctggtgacaatcccattttctgcaagaatgaaggctgcagcaggattggcagccctgatgaggctctgcagctgaacaaggagagggtgccgctgctccgtggtgtgactggtgaataccacgttactcaccaggcctgggaataaaaccaaggacagtttagccttcacagtcctggttaggggtgaaggctcacacaaacgtgagcccttgctccatcccctaatcatgccttccagtagtctcctgatggagacaacccttacaccccaataccaacataaacagctatcattctcttcccacttcccggcactgccacctcttggaatgaatagcttcaagtctgtagctgccttactacctaacccctaacttcctctatcttttttttttttttttttaagacggtgtctcactctgttgcccaggctggagtgcagtggtgcgatctcagcttactgcaacctcagcctccagggttcaagcaattctcctgcctcagcctcttgagtagcaggaattacaggaacccgcaaccatgcctggctaatttttgtatttttagtagagacggggtttcaccatgttggctaggctggtcttgaactcctgacctcaggtgatcagcccacctcagcctcccaaagtgctgggattacagacatgagccattgcacccggcctcctctattattttaattctggtatctagctgatacttggaattcttagtcaaagggccttttcacacatcctgtatttagcatcatcaggaactggtgccatttaccttcaccagttcagaacaacacaattatcaaaaactcaccatataacaggggttattcattatatcctcaaagagtgcactgccaagatactgtgcacagggagccacatgattccaagataaatgctaacagattttagtcacgtggtaagaaagggtggcccatgtaagaagaggttgcagggtgggccatgatcactcccaaccttttggtgaaaatacagaagtaaaattcacaggaccacagagaatttggagatcaggaaacttaccacacttcaccaccccaagataattataataccccttccatattcattcctattttaacagttataatcatagcgcatatataagattattcattttgcatttttgttattcaataatttttatttacttcttctttttttttttttgagacggagtttcactcttgttgtccaggttggagtgcaatgttgcaatctcagctcactacagtctccacctcccatgttcaagtaattctcctgcctcagcctcctaagtagctgggattactggtgcgcgccaccatgcccagcttattttgtatttttagtagagatggggtttctccatgttggtcaggctggtctcgaactcccgacctcgtgatctgcctgcctcggcctcccaaagtgctgggattacaggtgtgagccaccgcacccagctgtacttcttaatatcgtagaaaatttcaaacatacacaactagaaaaatagtagaatgaactcccatcacctggtttcaggaactaccaacactcagctaatcgtatttcatctacactccacccagctcatccccggctcccctactgtatgattttgaagtcaatcccagatacccaattatttcaaacaaaaatacttcaacgtgaatttccataatataaggactctaaacatattaacaatgaactccttaatataaaaaaatccagtctgtgttcaaatttctctgtcttataaatgttttctcagttaataatttttgaatcaggaaccaaaggaagtctacatattatatatatttatatattcagtggctcactgaagcattgacctcctgggctcaagcaatcctcctgcctcagcctcctgtgtagctgggaccacaggtgtgcgtgccaccatgcttggctaatttttttattttttttagacactgggtctcattttgttgcccagactggtctcaaactcctgggctcaagtgatcctcatgccttggcctcctctaaagtgctgggattacgggcgtgagccacggcacccagcttcattaggattttcagttcctctagtggtcacttttatatctttaaagagtatacttaaccctttataacttgatttaatagctttaaactttatcaatctcccattctgaaagatgtaaagagtatctctcctctgccaattttttgtaaaatataatttcatagataggctttcaacatttatattctattttgtaatagaattctcacaggtgttataattctatacttaaaaaagattcaatgctcatcatcaacccatttactaatagagagtagtttaattatttttttattattattatttcttgagatggagtttcgctcttgttgccctggctggagtgcaatggtgcaatctcagctcaccacaacctccgcctcctgggttcaagtgattcccctgcctcagactcccggcctcccgagtagctgggattacaggcatgcaccatcatgccgggctaattttatattttttagcagagatggagtttctccatgttggtcaggctggtctcgaactcctgacctcaggtgatccacccgcctcggcctcccaaagtgccgtgattacagacgtgagccatcgcgcccggtgagagtaggtttataaatgaatagttcttaagtgaatatctctaaattatggagatttctgctttcctaagtgaccttgtaactgcagaatcctaagtaatgaatattcagtaatgaacactctatactgatactatttacttcagtcaagtgttaagttaaaaaaattagctgtattcagttattgagggcgaaactcagaacatatagaaagtgtgtcaggctgttttggggttgctgtaaagaaatacctgaggctgactaatttataaagaacctttagcttaattggctaaaggttctgcaggctttccaggaagcgtggcgctggcatcggcttctggggaggcctcaggaagcttaagatcatggtagaaggcctgggagccagcatatcacagtggtgagggcaggagcaagaaggggcgggggaggtgccacactcctttaaacagccaggtctcctgtgaactcaagagtaagaactcactcactatcacaaggacagcaccaagccattcatgagggatctgcccccatgacccaaacacctcccactaggccccactttcaacactggggattatgtttcaacatgagatttggaggggacaaacatctaatttatatcagaagtgttcacaaagaaaataaaataattcctttcctgtccagacacctaaattccctgccctggaggcaactgcagttatcagattcttacctcttcttccagaagatctgctgagtatatacaaaagtgttgagtataattttttccacaagtagtgacacattacactgttctgcaccttttccccccacttactccctttactttttaattttggtaaagcttacatcttccttcaaatctttcttaacattttatcatcctagtcctcccctcatgccaccctgctctctccccttctctgaactaaaaaaaaagaaaaaaagttcttttgaataacacaggtggcacttaaaacacaggacttatattctttatttttatttttattttttttgagacagagtctcactgggtcacccaggctgcagtgtagtggtgtgatctcggctggttgcaacctccatgtcccgggttcaagtgattctcctgcctcatcctcctgagtagctggaattacaggcgcacaccactgcacccgtctaatttttgtatttttagtagagatggggtttcaccatgttggccaggctggtcttaaactcctgacctcaggtgatccacctgccttggcctcccaaagtgctgggaatgcaggtgtgagccactgcgcctggcctggacttagattatttatcttcttcctctatgggaaaagctaccataatgtaaagactaaggcatttagagccaggtgaacctgagtttgaattttgagttccgctaattactaatgggtgatactagacaaattgctctactttctctctgaaaccaaatatcctcctctgtaagatgggaaccgtaacacatcactctaggttatcaataaaacctaggcttatcatagggcctacagagagtaagaatccatgaaatacaatctatcatttccaccactaccaccatcagcactgtcaattgagcatcagcctgagaattagacttctccctgtacatagaggggcctgtcagtggctgtggcattgggtcttggccatatcaaccactgggaaactaagtcatacaatttccacaagccaaggcagctacactcgtggtttagatggggggcaaggaatagtttgaaggcagattccaggacccctggtcccctgcctctagtctttggtacctgtgttcgcatggccatttggaaaggtcactctgcagtgcactctggaggctgcagatgaggcagcaaagccagcctggaaagcttgatgccagaatcccatgccctggtgcagccacagaaagtagggcctctggaaactgagtaaggcaaagtcaggaggccaagtccaaaatgtggcacagtggggaggcaagcaggatctcagaagcctcagcacattctagagatggcagacatggaagccatatcctacaaagggcctgccagattcccagggtggaaggcaagaagagctctggcgggtctggcagtgaagagccagcaaaggttgagggaagatctataaataccctaggactctgtttggtatcttcttgggcaaaagaaaccaaagtgtcagactagtgcaaatgtggccatatgaacggtggtgcaccagggtcacaagcacaggcctggcctgcccaagaaaaggctgggatctgggtctctgacagacacaacttgtacaaagtcctgtctgctgcacatgtaccatatggacaaagcttgtggggttgggattctaggtcaggaactgggcacagaaaaggggctttgctttatagggaaacaagcaagaggattatccccagcattccttaggccagctatgtaaactgccacctgccaagaggaaatgccatctgtgaggcaggtacagcagttatctggagcacagggtgaacaggccatagtgagcggttccaccttgtttgggccaggagcttccttctgttctgtatcaaggagtggacagccagatttggccaaggtctcaccagtctgggctgtgagcgagcagacagcctggcgtatcctattcccaagagcagagaaacatccctattgtctggctgaccatcccagtctgggctaaagtattccagaagcccagcagaaaacaaaggtgacttcttctatctacagatgcttttaaaagcaggccatgacagtaaagtatctccactttgctctcacaccagcattataatgagtcttacttgctgtttaagcactgagattatttcttagtcctttgatttctataatacacattgtcttggggctgcaacatagtccttttctaactggaaaataatctcttatgaatcgggtagcctgactcatgaacaggagcaaagggaggaaatatgctcccttaggacatgaagtatttgtctactgctggcagatcccacctccaagccagctaccaaatctcctaggagaaaagaaatacttgccttttatctcctccctccccagacagcccatgcccatggcaagcctggtcaggccagtccacagggtcccatgggcccagaagcaaggcagtgtcactccatgagccccttggaggagttccgaaaacagcatatgtggcctgaaggtgatcagcccacatctgatcacacccctagctctacacaagcacagagtttaacacacattgtctttgcacaatgagttggaaggcagtataaatgaaacatgcctaccaaatgccagagagaacagtctgttttggcctcaaagggttcagactaaaaggggcttttctcttgtgagacaagcccagggctgcccctgattcaatgatgaaaacagaacacttccccaaggctctctgccagggaagccccaccatctgtgcttgttcctcatgcaaaaaagaagagggacactgagggagaatgccaaggagctgaggtgcactagggtgccaatcatcacacggtggacaaggggctctgaaaggaaaagaaggctccagcatttacaagaacaaggcaggcctgaggctggacaggtcagcaagtcctaggcacaccatctgatagtcaatactgccccctaggcaaacacttcctcaacttcacctgcttccaactaaagctcttctcaaggacactgcttctctgagtcaatcttcacttgggctctggaccctaccccttccttctcaggggtcccctctatcaaacctagtatctccttgcagcccacaggctttctcagcagcaaataaggaggaactgatcattaagaaatgacaattcttggaagtattctctagccatcttcctttttacagccccaagcactctagaatatcatctgcacctgctggcttccagtatctcacttgaccactggcccacttggagctggcttcagccctcacctctccactcagatcctcctactcaggtcatcagggtccttctcacttacagagccagtgggcttttctctgttcttccctcaaggtctctgcagcattagacatcgtggatctctttttctccttcctcaatgtctcaggcaacactcttccctgcttctctttcggtgtcctggaacctccaccctcaccccatctctagccttctgatcttttcaactctatatctggatactggctgactacagtccatgccattaactttgaccatgacttccaaatacgtatcttaggatgagacagccctccttggttatctcctggacctatgttttctcctgtgctttctatttgaaggacaggtaccaccaaccttcctaatctcctaagctagaaacctaggagtcatcctagatacctctttttccaacacatgccccacatctagtctgtcaccagatcctattgacccaacctccacaaaatctccttaatctacctggggtggatactgtggatggacctacccaatctccatttcatcctgtttctgaggtgcagtgcctagaaagtaacagggacctctgaaagctggacctgagactacctggtacagcagcccaacatacacattcctccctccagggaccagcctcctgccctgggcagcatgagctcagctgtttcccaagacaacaactctggtatgctctgttgtctccgctccctgcggactggcaatacgatcagcaggatgaaactgtgctggggacactgagttgttttcttccatctgatttctgcttgctggactagctcaggaagcccagaccccaggcatgtctcctgataacaatgagcatttcatcaccactgcagggaattcagaatttattctggacctccaaacatcacagataatatgactagaaagtgctgcttccagggttgtcaggtagtagggcactgcaaggttgaatgcaacctgcaggatgggtgaatttttctcaatgttatcaaggaaatgcggaaaattccagggtgcataggggtgggaggtattaagaaagacaggtcccgctgggccaaactcagcactcttggggcagaagtgaatcaagatcttgctgatccagaggctaggaatacctactcagtccactagtattagctggaatgccaggtggacttaagcccagctcaaggagaggtattactgtggcaatttgttgccataagagacaagctcaggccaggcgccgtggctcatgcctgtaatcccagcactttgggaggccgaggtgggcggactacgaggtcaggagttcaagaccagcctggccaacatggtgaaaccccatctctactaaaaatacaaaaattagctgggtgtggtggtacatgcttgtaatcccagctacttgggaggctgaggtaggagaatcagttgaacctgggaggcagaggttgcagtgagccgagaccacgctattgcactccaatctgggcgacagagtaagactccgtctcaaaaaaaagagacaagctcttggaagaaatgtgcctatcaaatatggtaaaagtaaaggtgtcaaagttttttctgaccaattttgtttgctttagatttcagaatggtaggtaagagcacgaagaaaagtctattgctgaattctactgaacttgcaaggcatgcaggctgaaaataaagtatattacttaccttgtgaacactggtcaagacatttaggaaagagaaatctagggggaaaaaagggggaaatatttaaaaaccattcacctcagagttgtcactgattatttcccatacaaataggagtaccactgacaagcaaattgactcacatgatgaggcaggtggcagcagcactgagcactaaggatagccatgggactttacagctttccgtcaaagctccccacaccaggagccccacagaagtccctacatggccaattctaagtggaatgctgaaggagggatactggggacaggaccagctctttggtctatgggagatggagaaagagctggtcttttttgaaagacatatgtttttgagtaaagtggatatttcaagggaaaataagaattacactcatctaactctaccaggggcctttaataccaaagctgccatgcttctctttatgtacatgctataacctcaattctcctttaatctcattcttaactcaaaaggtgaatgaaaagcaggaaactgaccatctgaattacaagtgaagcaagaggtgggggtgactgatccaaagtgtgagttacttaacaactgtagcactgcagtaggctccagagaaaaactcatattctcacaggacttcagaactcctaaaacatcataaggcctgtctcaaggaagaaagctaacactaatggggatagctgccttttatggagttcctcctgtgggcaaggcactgtgcaggcagttcacaaacatgatcttgctctgtcgtcctgtctgctctgtgcctcaggtatctaacagatgaaaggcatgggtttaggacggctaaacacactaagcttgcccagtgtctcacaggcagctgggaggcagcagggctaaggcagggacccaggtctgtttggcaccacagaggtcctgtgttttcttccctggcaattgggatgctagctgaagccactcttctgaatggctgctggtctagctggcagttattaatgatgttcgcaacactgggggagtttctctcctggaatttccttggtggcagcaaatcttcatccttttatttgatttctgacaacagccagtcacacatcatttgaaaccaaatttggtagatgagctgggtgaataccaggttgggctgtgaatcctgttcccttacctgactccctcatagtttctgaagaattccaaggaggaaaacccatgtgctataagcagggtcaaaggggctggaacaagggaagatacagccacaccagagtctcccaagaatagaactcactgacttcactgtgctcacagtccacagaaggctgccacacagtaagcattcttttacttactttaaagttttacttaaaaaaatttaaacagcctgtaatcccagcacttttggaggctgagatgggcagatcacctgacgttggaagttcgagaccagcctgaccaacacagagaaaccccgtctctactaaaaatacaaaaaaattagccgggcatggtggtgcatgcctgtaatcccagctactcgggaggctgaggcaagaaaatcgcttgaacctgggaggcggaggttgcagtgagctgggatcatgccactgcactccaacctgggcaacaagagcaaaactccatctcaaagaaaaaaaaaaaaatttaaacaatggagcaactgttcagttggtgaaggaagtcaactcctttttttgagatagcgtctcactgttgcccaggttggagtgcagtagcatgaacacagctcactgcagcctcaacctcttgggctcaagcaatcctccagcctcagcctcccaagtagctgggactacaggtgctcactaccacacctggttaatttatttttttggcagagacagggtctcactatgctacccaggctgctcttgaactccggggctcaagcatcctccaaccttccatcttccaagtgtgctgagattacaggcatgagccactgtgccctgcctgattttgttacttaaattcttatattccataatcatgttcacccaattttagccttatttctatatttaaatagattatatactcaacttcagtccttttacgccttattaaaaaaattttttttttgagacagagtcttgcttgctctgtcacccaggctggggtgcagtggcacgatcgcagctcactgcaacctccacctcccgggttcaagcgattttcgtgcctcagcctcctgagtagctgggattacaagtgtgcaccaccactcctggttaatttttgtatttttagtagaaatgggattttgtcatgttggccaggctggtctcgaactcctgtcctcaagtgatctgcctgccttggcctcccaaagtgctgggattacaggcatgagccaccgcacctggccttaaattattttttaacaatatttagtacacacatgttggagcacccatttatttagcaggtatttcataagtccttactatgtactattaaacagaaatagttctccctcacaaaagctaagcttgtcttccataattcctctctcttctttggctataagtccaaaggggtctattgaggacctagcactaataaaagaacagcatttactacatacaaggtgactaatgcattccaaaagatctgtcttcttctggtgggtggaaacaaatcactttcagtacacttacacaccatatcctgtatctacctgtgctccatgtagcagctcatgggctccacacatgctgtgatggcaccaatggtgaaggaggccttgacatttgagtctgggtgggtctgcagggcctggacaacatcaataacatctgtgtagctggggaaggtaaaaaaggaatgattagttcactgactggcattgcaaagtggaggaagaggggaatcccgaatggctgattgaacaaggatggaaagaaaaccaaaaggaagagcccgcaatctggtcccttggtgtcactccacttcatgacatgcagcccctggaagctacagtgtttctacattcccaagttccattagtcctcataactgggcaagagtgagggaagaaccaccctgctctggaggtaaaaggaagcctgcaggcgatcctggagctctgagggtgggacctagtgtccttaggcctgttttctaatcaagttaggagctcctgccacttgcttattttctttagtagctcctttctctccttcccacttctcagaacacacaggcaagagagtgcgtccggacccatccaggtcagcagactcatccatgtcaaatacagctcacattggtatctcctgcctggaactctctccaaactccaaactccttgtccttttcagcagatggactctactctttcagatgctaggctcaaatatattttttttggtctcctttgactccatttttttctgtcttcaaaatataactagaagagatcactgcttacacccccaagctcccactgggtccaaactgttataatctcttgcttagatcaccccaacagcctcccagctgtcactgcttctgtccttgcctctctctgatctgttttcaacacagatgccagagagatatgctaaacccagagtcagatcatgtcatttctctgctcaaaacccgctggtggcttccatctcactctgtgtgaaagccaaagcccttacaatgtcccaggcagccctctatgatctgaccccctatggagcagcaaagaatttcatctactatcacttcccttgccctaatccagctactttggtctcctggctcttttctgaacatgccaggcatacttctacctctgcattctttgcccccctgcctggaatgttcttttcctcaggtatctgcatgggtggttctctctcccttcaggtctctgctcaggcggcatcttacggacaggcatcctctgacttcatacaccctgtgtgatcaagcaaccctcgcttcttggcattccctacctcctcctccaagtttcttcaaagccccaatcggcagctatttataccctattttctcatttatttgtttactgtctccataataagaatgtcaggtggttgttgagtactgtaatctctgctgcctaaagcagggtaggtgaataaactggatgttcaaccctgagcaggcccctggccacttcaagaggggacctagcctcttcaccttgtagaggagaactctttcctgattgatccggcctatcaccaaaaggtttgttcctatggaaataagtcaaacctaacaggcagcttttctgatcagatgggcctggtttagcctgagccctttggaagccagtggtggtggtatggacaggtacagcctgcttgagttgttcttgagttcctacgaacaactcatctgtaaaaaggcccttggctttatccccagactgcaatactccaccccaccccaggttctcctgagtcctgatcagctggcagtgcttcagtagagaacggggtttactaggttctaagagttcccccaggggggcctgacagccctctgctcacagccttctcttcttcagggattctccccctgcctgggcatgtatgtatgaccacacgcggctctttccactgagtgcctggctgggcctggatgccaggagagtcccacccacaacacgcactgccaggcccatagagaagcacgcctggtaagcagggctggcgtgtgcatgctgttctgcatccctctgtggtggtgtttaatggagttaatggatttaactcttacagttaatgtgaaacatgtgctcactcagattgtaggcttaaattgcaaacataaaacagcctacaggagacttcagtgtaagcagtagagactcatttcttaggggagcaaaggacaacggaaaaggattcacaagtcatgcttgaggagtcattttaatataacaggatttcccttagagagagtgcctggggaatttctaggttttcagagcatttcattaatttccattgactttaatggaaaaaggttagagtaaaaaacaggcccctgtctccttgatgaggcctatacatctgggcactgcctcaagagagaaggccccaggccattcactctatccattaggggaatccctgttagaacctccctccctccccagccccataatcatcctgggtgaggcctccagacagaaagagcaccccctacccagaaggaagcaccacgctcaagttactagagtctttttttttttttttttttttttttgagacagagtcttgctctgttgcccaggctggagtgcagtggcagggtcacagctcacagtaaactctgcctcccaggctcaagcgatcctcctgcctcagcctcctgagtagctgtgaccacaggtgtgcaccaccacacccagctaattttttgtatttttggtagagacagggtttcctcatgttgctcaggctgctctcaaactcctgagctcaagtgattcacccaccttggcctcccaaagtgctgggattacatgtgtgagccatggtggccaggctacagcttgtaccggaccactctggctaaactgacccaactgtatgacgaaggcaaaaaactgtctcttcacgtttgctttctgtcagtattttctttattaaaaataaaaactaaacaaaaacccagcaggaccttaactttcttttctctgaaacaacagataatctattcaagtctcctttgggctcagttttatgtttgcaatttaagcctacaatctgagtgtgcacaagtttttacattaatttcaaattttgtttttaatgcagataattttaaagaatgattttataatattccagagtataaatacagcccctcaaattctctaaaattaattttttaaaattcagatttttccagttttacttatatttgtgtgtgtgtatgtgtgtgtgtgtgtattaagttctattcaattttaccacctgtgtaggttcttatatccatcaccatggtcaggatactaaacagttccaacacacaaggatcccttgtgttgcccttttataaacatgcccacctccctcctgccctccactcccattctgacctctgtcaatcactaatctgtcctccatttctaaaactttgtcattttaaaatacataaattcaatttttaaaacaacaactaacagctccacttgatgtcaaagttcaattctattgccccaccgcttcactaaattgagtggcatcaggccactctaggggctaaagaaatctctgtcctatattacatgtttccccaaagaatgctataaatgaaaataaagccaagccaggcatggtggctcacacccatactcccaccactttgggaggctgaggtgggaagattggttaagctcaggagttcgagaccagcctgggcaacatagggagacccatctctaaaaacaaaggccaggaactgggcgcggtggctcacacctgtaatcccagcactctgggaggccaaggcaggcggatcacttgaggtcaggagttcaagaccagcctaaccaagatggtgaaaccccatttctactaaaaatacaaaaattagccaggcgtggtggtgagcacctgtaatcccagctacttgggaggctgaggcacgagaattgcttgaacccaggaggcggaggttgcagtgagccgagattgcaccattgcactccagcctggacgacagagtgagactctgtctcattaaaaaaaaaaaaaagggccaggagcggtggctcatgcctgtaattgcagcactttgggaggctgaggtgggcggatcacctgaggtcaggagttcgagaccagtctggccaacatagtgaaatctgatctctactaaaaaatacaaaaattactcgggtgtggtggcgtgtgcctgcaatcccagctacttgggaggctgaagtgggagtattgcttgaactcgggaggtggaggttgcagtgagctgagattgcaccactgcactccagcctgggcaacagagcaagactccgtttcaaaaaaaaaaaagaaaaagaaaaaaagaaaataaagccatattcaaggaatacaattcttaatatgagaagcatctgggatctcccatcaccaacaacctaaataatgggcatgaaggcccagccccaagatgatggacatgctataaaggagggtgctacatgggcccagctggtaagaacagcgtcttagtgaagagccacagcatttagctagtattctgactggagtcctccaggaaattgactagaggtccccatatcctggggctgtgatgggacaaaggctgggtttacagtataagagtggtctggtcacactgtcactgtagtccagaagcagctagaaaagctgacacttttgcagaattgtaaagtcagagacaaaaaatcagtgatgctctccgaagtgatggaagatggaaatgacctcaactgcacattgtcaagctgctgaattcacctccaggtccacaccctcggtgactctcaactggtgggggcaggcagtaaaggaggtgggccaacccattcctttgaccagtagaaacaatgaaaaaccagaagaaaacaagtggtttcaagcccagactcttcctctggtttctaggaccttgcccacaagcaggacaaaagggctgacagaaggtaagctggaggcaaggtatgagaacaaggctcgaaagggaaagatggcctgctagggtacaccgtcccacctgcctccttcctcagtaccactctcccagctttgctccaattcccatcatcacagccaggacaccaaaggggctttggattgggacccattctttactggaaacaactagccaattgcaaacactaacatagcacaaaagcactttgtaagaactaccaaaagcttctttattaccaccaaccataacaacattagtgaaaagcatggctcctgttttcctgactgcgcattcccctctgagcctggagtggtgatgggtctgtgaggggctcctccctgaaaggccttagaacaggtcaaaagaaactcctttcagccagggtcccctggagcagtggtacaagctctgtcaaacctgccctcccgtgttgcacactcaaaataatcatgcttacagagacttcatgagctagtcagcctataatcatagttctgcacacagccatgaaaggggagcttcttacccaatatgaatattcccactcctcactgaaggtcccaggaaactctcctgggccacaatccagggcatggtgaagctggagactgcagagtatgagggtcatctctgcaattccacaagagggaggactgaaacagatgaagctcccttatttagatgatgaatgaagacttagggaccactactgctgcaaaaattcccaatgaatcttgccaggttccctaattccccaccttgtggggatatgatgatgttaaatccaaacttaaaacttgtgtgcaagctatactagcctataggccataggatggcaatagggtcattgctcgcttaaggcttctctgtagcgcagacactgctcatgcatgtagagtctgttctgtgctccaggtttgttacacataaaataagagtaatggcaaggtcatcaccctgattcgactgtttccaggagacttccaatgctcacccttgtaacaccaccagcagtctggtcttcttgcggatgtaggctgactggcgcgcagagcggttctgctgggcctctagggcactggaaaggtatctctggaagtgtgcagcatgaaaacattcagagctgtccatgatttggcgatacaccatccatctggaaaggtaaaaggtaacctctgcatgggggccacctgatggcctagctccataggttcagccatggattcaaatgtgaccatgagtcctaaagccattctgcccagtgaatccattcaggagaaagccatcttggcctcacagaaaaaaggcagagggcactggatgggttggaagcccagtatcctgaaaccactgtcactggggcttttgataggaaaccccttgccatagggaaaatggtcaggtaagcacttgaccaacagacatcagaggtaagaaagactccttctgaccaggcagtcactttctgaaggaccatgcaaaagatggcttcagttagtctcttgctaagaatcagaaatgggcagggttggctgggcattgtggctcacgcctgtaatcccagcactttgggaggccgaggcgggcggatcacctgaagtcgggaggttcaagaccagcctgaccaacatagagaaattccatctctactaaaaatacaaaatcagtagggcttggtggcgcatgcctgtaatcccagctacttggggggctgaggcaggagaatcgcttgaccccgggaggcagaggttgcagtgagctgagatcgcaccactgcactccagcctgggcaacaagagtgaaactccatctcaaaaataaaaataaatgggcagggtgaataattcagaatctttatagaacaaaaacactagacacgaggaactggttagacatttagtactcaataaatgaggtcctgtatttcccaagcattgctctgtaatttgcctccccattctccacaatatcccatcctaaactgccgactctctatgcaatttcaggcttccaaatttctttacggcctcctgcaggatgccttaccttggggtagactgactggatattaaacacctggttcaatctgcaagggttgtttggtaatctgacagccaggtggaagtgaaggatgaatgattttcctgatttcacctgggccaacctgttccagctgcatctgaactcaggcagtctccttgtgctcatgggaggatcatgacatccaccaggcctaagttttataaccatcatgaccctgaatttccctgctgaccagatgcactcccagccctctacatttgcttgacctgctgctacaatgctctcccctagatagctacatggtttattccttaaagtctctgctcaaatatcacctccttagtcaagttttcccagaccatccaatttaaaattggaatctaagctgggtgcacagtagcgtgtgcctgtatctcagctactttgtagaatgaggtgggaggatcacttgagctcaggagtttgagaccagcctggacaacacagcaaaaccccacctctaaaagcttttttaaaaattagtgcagcacaccaacatggcatatgtatacatgtgtaacaaacctgcacgttgtgcacatgtattctaaaacttaaagtataattttaaaaaattagttaggtgtgatggtgcacacctgtagtcctgcctacttgggagggtcaggtgggaggataatttgaacccaggagtttgaggttacaggtgaactatgatcgtgccactgtacgcgagtttgggtgacagagagagaccccatctctaaaaacaaaacagaaaactgaaaccccactcccagccctgcacttcctataaccttccctgctttattttctgtttttttgttttgtttttttaatcagggtctcactctgttgcccaggctgggatgcagtggcgcaatctcagctcaccgcagcctcgccctcctaggttcaagtgatcctcccacctcagcctcccgagtagctgggactataggtgcatgccaccacgttcggctaatttttgtatttttgtaggttttgccatgttgtcaaggctggtctcaaattcctggtctcaggcgatctacccacttttgcctcccaaagtgctgggattacaggtgtgagacactgcacctggccccttctctgctttattttctccatagaacttttcactagttaatatacttttccttatctgtttgtcttaccaaactagaatgtaagctccataagtgcagagattttcgtgtctgtatgttcatcgatgtattctctcatactcagaacagtgcctgccatacaggaagtgctcagaagagcatattaaatgaatggctgactaccatgctgataccagtcccaccaaggccagtacatgtctaaggttttccagtgcctaggcaggcccaagttagaatccctttccccaaagcaaaggcatcagccatactaacctgccacattccttatgcagagtgaccagaaaagcacagagctcgctagcgtgacagcctgggaggccggttacaatgctgataattacctacatgaagaaaaagtcatgggtttgcaattcaactgcattgcattatgtaagaagaggttaagagaactgacttctggtgccaagcattgtgggtgtgaacctcagtatgacctctcactaactctgtgaccttaggccaatgacagaacctatattgtaaagtgggtgtgaggattaactgggttaacataagcaaagtgtttagaacagtgcttgccatgtagcaaataccatataaaatgtagtgttactagtttaatttttactagagtagtaacactaattagagcatattgtgaatagattagttaaaatacaatgcattaaaggacctacctgcttgagaccacagatctcttctgtaaagcagacattcagggatattatgactttttttcccagtagtaactatttcttaggaaaacactgggcagaaaggaggtctgggacaaaaatgccccaggctacactggtgtagtaaactagggcagaagacaggagagtggtgctggggatgcttctgcctggttgcctgtgccctccaagtcacacggtcagggctaagtctttttttttttttttttttgagatggagtctcactctgtcgcccaggctgaagtgctgtggtgtgatctcagctcactacaacctccgcctcctgggttcaagagattctcctgcctcagcctcccaagtagctgggattacaggcacatgccaccatacccagctaattttttcatttttagtagacacggggtttcaccatgttggccaggctggtctcgaactcctgaccttgggtgatccacccgccttggcctcccaaagtgctggaattacaggcgtgagccaccgcacctggccgaccagggctaagtcttactcactgtgcgtgtgaagcacttgtgattctggaagagaagaggggccaggctgaactgtcctaaccttattatacacccacaggaaaataggtcccctttcaggtagatattccaaagcaacttaataaattcactgaaaaaggaggcatcaggcaggtgaggacaggaaccctgcaatcaccgagggaggtctatgtaaatgacttggcatggcaagtgcctctgtaagtttttttgtttttttttttttttttgagacggagtctcgctccgtcgccaggctggagtgcagtggtgcaatctcggctcactgcaacctccacctcccaggttcaagtgattctcctgcctcagcctcccgagtagctgggactacaggtgcccaccaccatgcctggctaattttttgtatttttagtagagacggggcttcaccatgttggccaggatggtctcaatctcttgacctcgtgatccacctgcctcagcttcccaaagtgctgggattacaggcgtgagccaccagcccagcctgttaagttttatttcacaatacacaagactcactgggacaggcccagtcacaaataacttatgctaaagctaagcctggaagcactcatcacttgagctgcccacatcagcacagagaagacggccgtaaatccctcttcttttgtaggacccagaagctgtctcttgttccctctgaccagggcctctacaccgtacccctttctacccctcaggcagtactccatgtttatcctcctcctatccagccttccctgtcttcgttcctatttctcagtgcccaggtctcagcccctcaaatcgcagcacatgtacatacagccagacatgtttttactttaaggccaatccaagagcaccttttttttttttttgagatggagtctcgctccattgcccaggctggagtacagtggtgcgatcttggcttactacaacctccgcctcccgggttcacgcaattctcctgtctcagcctcccgagtagctgggactacaggcacctgccaccaatgcctggctaatttttgtatttttagtagaggcgcggtttcaccttgttggtcaggctggtctcgaactcctgacctcaggtgatccacctacctcgacctcccaaagtgctgggattacaggcatgagccatgccgcctgggcgagcaccttttaataaaatacaacaagtaggtatgctttacaaacagatgctttacactcttgcctaagggaaaaaatgacgtttctcattgcttagtgcttttatttccttttgcagctgagtatcttctagacttgcatggaaataaatatcctctttgagcctattaagacttatggttctgggctgggcgcggtggctcatgtctgtaaacccagcactttgggaggccgaggcgggaggatcactcgaagtcaggagatcaagaccagcctggcaacatggtgaaactctgcctttactaaaaatacaaaaattagctgggcttggtggcacatgcctgtaatcccagctactcaggaggctgaggctggagaatcacttgaacctgggaggcagaggttgcagtgagccgagatcgggcccctgcaccctagcctgggcaacagagcgagactccatttcaaaaaagaaaaaaaaaaaaagccaggtatggtggctcacgcctgtaatcccagcactttgggaggctgaggcaggtggataacctgaggtcaggagtgtgaaccaggtcaggagcttgagaccatcctggccaacatggtgaaaccacatctctattaaaaatacaaaaaattaacagggcgtggtggcaggtacctgaaattccagctacttgagaagctgatgcaggagaattgcttaaatccaggaggcggaggttgcagtgagccaagattgtgccattgcacttcagcctaggcgacagagcaagactcaaaaaaaaaaaagaccatcctggctaacacggtgaaaccccgtctctactaaaaatacaaaaaattagccgggcgtgggggcgcatgcctgtaatcccagctactcgggatgctgaggcaggagaatcccttgaacctgggaggtggatgttgcagtgagccaagatcacaccactgcactctagcctgggcaacagagggagactccgtctcaaaaaaaaaaaaaaaaaaaaaaaaaaagagacttatggttctgaaggaatggtgggagggggtcaagaagacgaagtgtgaggcaagagcagattaaaatccactctgggggccgggcacagtggctcacacctgtaatcccagcactttgggaggccggggtgggcggatcacctgaggtcaagagttcgagaccagcctagtcaacatggtgaaaccctgtctctactaaaaatacaaaaattagccaggcgtggtggtgcatgcctgtaatcccagctactcaggaggctgaggcgggacaatcacttgagcccagggggcggaggttgcagtgagccgagatcacgccagtgcactccagcctgggtgacaaaaaaaaaaaaaaaaaaaaaaaatccactctggggaagatagtgtttataaagtatcactttaccctgctgattccggcaaggcctgaataacatgggtgcccttccctgtattaagtgcaatgtgtcaaccactgccaggtaagttcctgtcacaatcaggaagagctgatggcatgaaagcactgagtaggagtttaaatgttcttgagaggccagggaagggcacggcaagatgctagggttttgtcactgtcatgaggcttggctggggttaatgtagacacctgacacagtcattgtatacagcaggttacatgttatcattacatttcaggatccaaggaagtggagagtcctgtaacagggactccatctaagttctttttgttaactgacacaaaagattcaggggcaggctctcaagatcatcttcctgtgaattcccagcatatctggtgagctcctctaccttgtcactttctattctgtgagtagtgttgatttcagcttgctgcagcagcacaggaagatgggtccgcatcacaggctcctggctaatgctgctgatggcgaaatgctggagaaacctaaaaacacaaagacaatgctattatgttaccatcctagcctgtcctgaaggtgcctactcacatgaaaaagtttttacttaattgctgaaaaataaaccttggagagattctctctagagaataaaattgtgtacagtgtgttactgcgacattttacagtgatctctaagaaactacaagaaaaaggagcttaaaaggaccaacactgaggtttccgacatttcaaaagccagaatattaaacatctataaacagaaccagagcttaccagtccagctctgggagtttggctgagagtaactttagggaactccgtttctccccagcaggctggctcagggcactgaagagcttctgtgcactggagtgcctggaataacaaaagctcacagattagaagtccatcttccttcagcatatacactttacacaactgggcctgatgctttcaagccagagtccaatgacagagtcaactcttccaaaacacacatctcagacttaaacaaaatgaggtgttagtgcatgatgatgggtaagtccacatagaaaggttggcctgaaatcccttgataataccatgagtttctgattctcggtgatttcacctctccttttttttttgagatggagtcttgctctgttgcccaggctggagtgcagtggtgcgatctcggctcactgcaagctccgcctcccgggttcacgccattctcctgcctcagcctcccaagtagctgggactacaggtgcctgccaccacgcccaactaattttgtgtttgtatttttagtagagacggggtttcactgtgttagccaggatggtcccgatctcctgacctcatgatccgcccacctcggcctcccaaagtgctgggattacaggcatgagccaccgcacccagctcccactttttttttctttttttgagacagagtctggctctgtcacccaggctggaatgcagtggcacgatctcggctcattgcaacctctgcctcccaggttccagagattctccagcctcagcctccagcctccccagtagctgggattacaggcgcatatcaccatgcccggatagtttttgtatttttagaagagatgaggtttcaccttgttggccaggctggtcttgaactcctgacctcaggtgatccaccacctcggcctcccaaagtgctgggattacaggcgtgaaccactgcgcctgacctttttttttttttttaaagaagcccaaacacattttcttgctgtatttatgttgaattccccatctacaatgagcagtcacgaagatggtcttcttcagggcaacatggtcacaggactggggcaatccaggggactgagagggagcgtgaggatgggaggtggggctacctcctgctgtttcacattagagacaaactgtaacacagtccatgggcctgcaaccgtccccttttattatctggcataacgcgtgatgtagttgtccactttattctggaagtcctccttgtcctgcaaatgatgttctgcagcttcaatattcagtggatcatcaaaattcaaaaatcagtaaacaaagagtttaatccccaaacgacatcctttaatgttctcatgggagcccagccagtgccgtcaattgaatgttctctcagtaaactcagacatatttcccctgtctctgtgatgttggggtgccagatcttggtcaggcatttcactttgggaggcaccatgttgtacacatcgggaacttcggtttcaagctgaaattttccaccctggtagtaaccctcatctggagttactgttagctgagaacagtgaagcttgtttggatcaggaaaatgcactttacatgtacaaggtaaattagcttcaagttctgcaacctctgtagtcccacctgctaagcgggaggataacctgagcctaggaggtcaaggctgcagtgagccaggaccgcaccactgcactctacccggggtgacagagtaagacactgggcgccccccaagacaggtgagacgggcccggcgcccaacaccatgcttggcccgggtcagggctgtgagacgtggcccctcacagccacactggctcctggcagtggggacatttttcgtttttttttttgagaaagggtcttgtttcatcactcaggctgaagtgcaatggcatggtcacggctcactgcaaccttgaattcctgggctcaagtaacccttccaccccggcctcctgactagctgagactacaggcatgtgccaccatacccagctaattttttattttttgtagggacggggtctcactatgttgcccaggcaggctagtctctaattcttgtgctcaattcatcctcctgcctcagcctcccaaagtgttgggattacaagtgtgaggcactgcacatggccctctcttgccttctattcccccaagggcaccggctacctgcaagttggcagcattgaaatgtctgtgttgaccctttcagaagccaagacccctgtgttacataatgcgaggcatcctgcagagagagcacacccacaaagcctagggaagcaagcacaaatactgaagcagccacttacaatctcttttgttccacagataatccatcttcctggatcacttttaaagagatccctgagttatcctgctgtttccagagggagaagacctaaacaaaacagaatttgagcaaagaacactttaaacccaacaacaggatatggaagccacatggggatttgatggttgttgaaaatctagactgtcactgcagagaaaatgactataacaaacaagtttgcttcaaaaatagaggcctgaagcaattttgttctgtatttttaaaaaccagaatgtctttctgggttactcccccagggattctgctccttgagaggtcaggaagtaaggagaaaggggtcgggtaacactgtcctagcagcagacgcatgttctcctctagggagacagaaaggagtggttcaagcaactcctgccaagaagcagagggatggctgaagagaacctaaagagccgtctttattttcccagattgaaaggacaagcacaaggaggtaaaaaggtccagcaaaggtggaagacacagactgggctgagaagctatactatagccaaggtcaactcttgcatcctctatggtctgcgaatctgacctgagggaggaacactgtcccctcacaagctgctgtaatcacacctttccaagaattcccactagtcatgaggctggccatcagtttggctttggctattgcttggtctctaagtgggtcgtttcattctcgtaaactccctcatctatgccatctgtgctgagtatctataaagtgcagcctgccaggtggtaccattcgcaagggcagggactggcccatggggaaggagactatagggtggcaaagagaacactaattcagtaggtagggcccaacaattcaataaagtagctaaataagagataactctaattaggatttaaaggacaaagcagatttttcttaaaggctaaaaaccctcttgttcagtttcttccagctctcacctctcattgccaacagcaccactccagaacttgaagggattagaagcagtcaccccacaccatccagccctcctaactctccctctcatcacttcactgttagccccaaaatgatgccttaccatttaaattgctagggggaaaaaaaagtagtagtagttttgctgaataatgactgatattacctctgagtaaaatgcttggtatatcttcgatttggggaaaagggcaatcatcagaaaattgcttgatccatggaaatgaactgggaggtgaggaagcaatgagcttttgaagtctatgagaagagcagcaacagtactggtggaatcctaaagcgaaaaggagggagcatcagcaagaagagcatctgcacaattacagcactcacaactactgccagaacacacaggatcaatttcagtacaattattgtcacattacgtagttcactgtggttcagtatagatgtgctttacttataggagatataggaaataaaaggattttttttttgagacagggtcttgctctgtcacccaggctagagtgtgatggctcactgcagccatcaagtgatccttctacctcagcccttcaagtagctgagactacagacacatgccactatgcctggctaatttttttaaactttctgtagagacaggggctctctctgttgcccaggctggtctcaaactcctggtctcaagtgatcctcccaccttggcctccccaagtgttgggattacaggggtgagccaccacccctaatctggatttttttcccctatactgaaaatgtcatctcaaaattcactctaggatattaattccttatcagatatatgatttgtgaatattccattctgaggactgtcttttcactctctggataatgtcctttaacacacagaagttttaaatgttgatggagtccaatttacatattttttcatttgctgtccgtgcttttggtatcacattcaagaaatcattgccaaatccagtatcataaagattttctcctgtattttcttcaaagagttttattgttttagctctttttttttttttttttttgagatggagtctcactctgtcgtccaggctggagtgcaaaagcatgatctccgctcgctgcaacccccgcctcctgggttcaagcgattctcctgcttcagcctcccgagtagctgggactacaggtccgtgccaccatgcccggctaatgcttatattttcagtagagacggggtttcactatgttggccaggctggtctcgaactcccgacctcataatccgcccgccttggcctcccaaagtgctgggattgcatattgttttagctcttaatgtttatgtttttgatccactttcagttaatttattgtacagggtataaagtaagggtcaaacttcattcttttgcacacggatatctagttttcccagcaccttttttgtttgttgtttttgagacagggtcccactcaggggacctgtgcccaggatggagtgcagtggtgccatcttggctgactggcctccgcctcctgggttcaagcaattctcatgcttcagcctcccgactagctgggattacaggcatccacccaccacacccagctaatttttgtatttttagtagagatggggttttgccatgttggccaggctggtctcgaactgccagcctcaagtgatctgccctccttggcctcccaaagtgctgcgattacaggcgtgagccaccgcacccggcctctcagcaccattagttaaaaagactgtccttttgacattgaatggttctggcatccttgtcaaaaatgatttgatacaaaagtttatttctgggctctccatgggtctagtccactggtccatatgcctgaccttttgccagcagcaaactgttaggtcactgtagcttcatagtgagttttgaaataagaaaatgcatgtgttacaactttattttcttttgcaagattgttttaaacaataagggtcccttgagagtctataaattctacatgaactttaggatgggttttcctatttcttttttgagacacagttttcactctctcacccaggctggaatgcagtagcacaatctcggctcactgcaacctctgcctcccaggttaaagtgattcttgtgcctcagccttccgagtagctgggattatagatacatgccaccacacttgcctaatttttgtattattagtagaaacagggtttcaccatgctggccaggttggtctcaaactcctgacctcaagtgatctgcccgcttcagcctctcaaagtgctggaattgttaagtgtgagccactgcgcccggcagcgttttcctatctgcaaaaaatgccattgggattttgatacggactgcactgaacctacagatcatgttgggcagtattgtcttaatagtaagtcttctgagtcacgaacatggatgtttttccttcatttaggttgtctttaatttttctgcaatatttttcagttttcagtgtacaagtctctcactttcttggttaaatttattccctagtactttactctttttgatgctaatgtaaattgaattgttttatttttctgagacagggtctcactctgttgctcaggctagagcacagtgtggcatgatcacagctcactgcaacctctgtctcctgggctcaggagatcctcccacttcacctctcaagtagcttgggactataggcacctgccaccatgcctcactaatttaaaaaatttttgaggctgggtgcactccagcctgggtgacagagcgagactccatctaaataataataataataataataataataataataataataataataataattttttgtagagacggagtttcaccatgttatctcaaagtcctggactcaagtgatccacctgccttggcctcccaaagtgctggcattccaggcttgagccactgcatccagccctggaattgttttcttaatatctttatcagattgttcattggtagggcatagaaatgcaactcattttgaaaaaaaattataaaaatacaacagagaagaaagttttaaaaaaattaatagaaagtcccatcacctaaacccaactacagctaacatttagtacttttgttttccttttttttttttcagagacagggtcttgctctgtctcccaggctggagtgcagtggtacaatcacagctcattgcaaccttgaacttctgggctcaagtgatcctcccacctaagcctcccaaatagttgcgacttcaggtatacaccatcatgcttggcttttttttttttttttttctttttttgagatggagtttcacccttggtacctaggctggagtgcaatggcgcaatctcagctcactgaaacctccgcctcccaggttcaagcgattttcctgcctcagtctcctgagtacctgggactacaggtgcacagcaccatgcccagctaatttctgtatttttagtagagacggcatttcaccatgctggccaggctggtctcgaactcctgacctcaggtgatccgcccttcttggcctcccaaagtgctaggattacaggcgtgagccaccacgcccagccccttatcctgtttttaaaacttaatttatcatcaccatcagccatgttatcatacactatcagtaaacatttccagtgactgcactctcttcccctcttgggccacttacacagcttgacatgagctattccagttctcctctgccaacagttcctcaggatttattccttagtataaattagtatgctttaatactatattagtgtaatttaacaataaatgctaagttactgttacatatgatagcaggaggttgttaatgatgtaacttcttctatctgttaagtagcctcatgtcctctgaacatccctgaactgggactcagtgttttcatgttaataaagatacaactcttcgcagaaaaaaaatattaactcatttgtctaaatcaccaaaaatgtttttcccaattttaaaaatttgccttttgaaatacttttaaaaaattatatatatatatgtatatatattttgagacattctcactctgcagcccagggtggagtgcagtggtgggatcttggctcactgcaacctccacctcctgggttaatgcaattctcctgcctcagtctcccaagtagctgggattacaggcatgcaccaccacgcccagttaatttttgtatagtagaggtggggtttcaccatattggccaggctggtcttgaactcctgacctcaggtgatccacctgctccagtctcccaaggtgctgggattacaggcatgagccactgtgcctagccataaaaaaatttttttatttttaattaatacataatatgcacatatttatggggtataatatattgtttcaatacatgtatacattatgtaatgattacatcagggtaatgaatgagaaatccatcaactcaaacatttatcattcagaatcttctcttctagctattgtgagatctgaacaccttattgttgactgcaggcaccctactgtgcaacagaacactagaatttactcatcctttctaactttgtattcatcgatctacccctccccatcccctaaaatactttttaaagggtttttgcattactaattagtctgacaaattttatgatatacccatacaatggaatactacttagcaataaagagaacacagctatttacatacacaacatggatgaatctaaaaatcactatgttgagtggaaaatgtcagactcaaaggttacagaatagatgatgttcatttatataacattctagaaaatgcaaactaatatatagggacaaaagctaatcagtggttgtctgaacccaggagtggagggaaagatgaaaaagggcatgagaaaacattttggtttgatagtaaaggtggtttcatgaatgtacacatctgccaaacctttaaatggatacagttagttgtatttacagtatactttaataagttaaattatcagcataaaatttttaaaaatcagtaactggtcagctgggtgtggtggctcatgcctgtaatcccagcactttgggaggccgaggtgagtggatcacgaggtcaggagatcgagactgtcctggctaacatagtgaaaccccgtctctactaaaaatacaaaaacaaaattagccgggcgtggtggcaggcgcctgtagtctcagctactcaggaggctgacgcgggagaatggcgtgaaccagggaggcagagcttgcagtgagtcgagatcgcaccactgcactccagcctgggcaacagagcgagactctgtctcaaaaaaaaaaaaaaaatcagtaactggtcaaatttgacaaacttttcctttagaatttcttgtattgtttctaagcttcagaagtcttctaacccctagaggtttaataaatattcatttttatattctatttgtgaaatttaaatatatttaattttaatccctcagaagttcattttgatttttagtagaggtaagagtctattttttgtcgaaattagctacttatcatcccagtactgtgcttttcatgatgcattctttcttccctgatattggaagactctttaatctaacagcaacactttaatctaatagggccatccaatgtgtccaattggtctgcctacatttctgaacagcctttaaggctgcaggctctatatggaagaaaaacttgctcacagaattcgttttctgagccatctgaccaaaatacctcacatagtctctgtcctagctcccagacagactggttttgaggctgagaccaggcagagtggtgggcctgccctctgctctggtgttgcactgagacgagctgtgccttggccacagggtaaaggctaggggaaacccatagctaccatcttccccttaaggtgaatgggaagtgttggtgcagactggtgaacttagaggattgttataggacagtggaacttttatggagctggagaggaagtctgggtgtgtgagggaggaggggctaaactctcacggggaaagtgagccatttctctccctctctggctcacttacaatcctgtccatgctaatgtgtatgctgagcctcatcaataccacaggatgcagctcctttctgatttttcagtgggtgagccttgagcccctggacctggaggccacccaagaggggccactggaggccttctcagcctgctttatagtcctctttagggtgaatgaattgggcatggggagctgctggcccttctgaccagaagccctttctaggtaagccctttacagagcagtgaggttgatgaggctcgtaagcgtcttgagaatgcccaggcctctccacgacctccctccctgcctgcctcagtggctgtgctggttcctgacatactgccctgtggtagtggaggggagaaaggagttatttagttttcccctcaaaagtgtgagcaactttccgaccaaaaaagccactgactagtaaaacacctaccccatcatagaaggaaatggaattcatgtgatccttggaaatgatgatacttctatgacgacagtgagaaaacagaaggccactagagaagaaatgaacattccctggaaggaaaagagagttggtcagagctggagggctgggtgctgggggtcagattccaatgtcctcttgtacagcagtgtggtaactagaggccagtatcagtagcaattacgttatgcgatttgtatgctgagccctgtgctctgaggaagccaaagtaacctcccaaagcctcagagggaaatgaggcatcagatgcagtctttgcataagaattagaaaaacaagtgaataaactatcagctaatggggagaagcaaaattcacattaccttatgggtatcttccacggaaacacactaaaaaagactttgggtatatctgctccattactgagtttacagattttcctttcttctgctttgccagaagctggctcggccctaaagagaccacatccctcacttagggcccgagaaggagcacttgggtctcagctgaagactggtgaagggagcttaaggtccctgtgcccagcaacagaacatttgagttaggtaatgagtaagttctacagacactggggggctgctcttctgtagttcacaaaagcaagatgggtgacaggtggacatggatgtgggttcctcggaacaaggattcaggtctaaggagagctgttgtttcctggatggtcaaggtcatatggagcagctcagtataggccctagggagcagaccatggaaaagatggacaactaagatgacaaagattaatgctgggcctgggcttgctttggagacacaaaagcagcacccaaagcacccataagactcctaggtgaagctgctctctggggctggtccaagctgaatcttctattcctgtaacagcttttctttccatgtttccgcatatagagggagatgaagtagttcttaaagctcaaggcacaggtttgagtttattgtcattaagacctcactgccaaggcaaaggccaagagataaataagtgaaattgattccttaagttgtagctccagaaaagcagtgcaaagctctggaggctggaatgacaagaatagcaaaggccaggagtctgagggctgccttcacatcctgggtgaggaatctggagactgcaagctttgagggcttcctgaggaggtgaggtttcagaaggaagggaggggcctagttagtatgtgttcacaggggacaggagaagtgaagggagaaggaggcagtttttaggtacaagaagaagaactggcacctgcctctcatggaagaaccagatgccccgtcagagggacatgccaaccttaccatctgtggcagccacagccagcgactatctaggttcaagctctggaaacctctaccctccaacaagtagcctggctttctgtgcacactgccttttcctgaggccctctgaaaaggaggctaatcatgccccagcctcatcctgtaccaaccctaaagttcctccatgctgctcccaggccagtctccccaacaccacagcatgttactttcattcccctagagacacaagcccctccctctactgctcacacctactgccctcctgaccatgccatatttcaaatcactctgaatgtgctcagtcttcccttccaatgccaacactcccattccttcttagagcagtaaagctgcacccagaatgtcatgacttctgaaatctccagcccagcaactactctctgactccagcaccccatcccccttttagctgtttccctccccacaccccatcctctgatgtcactgagccttcacagtcattggtattcgcattttcccctattgctcagaaatttctgatattcttctcatccacatcaagggcagatcctctgggacaggacttaacctttaatctttgttctgttaaaagaaaggaatgggaacaggtttcacgcagtatttactaagcaccacacatgtcatacattatagttttctgttttcacaattgtaacaggtggtattattttttctcataggacagatgagaaaactcaagcttagagagatttcccccaaaatcacagcattacttggtggtggagccaggtacagaacacaggtttgtctgatgccaaagacactataccatgctggtgccttcagttctctcatgttttttttctttcaattctcccctgtccaaagcccagctgtggtgaatctgtagatgtgccttctctgctccctcaaccacaacaggccacagtgctgccccgtagcctgttcactgctgtctccccactccttccatcagcccacagagctcatcccagaccttcaacactctcctaaaaccacaaccccaccaactcctgccacaagatgactctacttactgtttccagagataagagggctccataggtgtcacgaggtagaaactgctcctgctgctgagtggttagtacctgcacccttccctgtcctgggtatccctctacatttgtacttttgaagtgaacctttttagaaacaagtccagtgccacttgaaaggcctcctggacaaagctcaaaatcctgaagcttccagaaaaaagcacagattggagaagctggcacattccatttactcaataggaagatgggaaaggatgagcgaggtcatctccagcatttcctctcccactagactctgaagcctcaaaacaaaatggaaaagaggaagacaaattcacaagacagtgctggaagagctcattatggggcatgagccaaggcaaggtctcagtaaacaggatctgatttcagtactgtcctgtgatctgtcctgtgatcgcagctgccccttagcctggctctatgagcagtaactctgccattattctcagagcacacatgagataagtgaagtgacttactgggtggcccagtgcctgtgctctggtctcagatcctcatctgcttgaagcaataacccttctggtatctgctctggactcttgactgtcagacagtggtctgagggccatacctttgcaggggttcacaggggccagggcagccaactcctgaggagatctccctgactctttgtgccatccttggtgtccttagtggatgaactctgtccttccttctccattctgtaagtctgaaaacccaggataagaggaagtttcccattattgtcccaaaaccaggaggactgcagtttggttgtctttgattgagctctgtatccctggaagtccaacaaaagagggatgggccctcagggtaaaccaaaataccaagcaaatgccaaagaagaatttcgctttcctctttcagaaaactggctgtacaaataaaaatcttccaacagcccagtctatgtgaggagggaacatttatcactgctggggaaatttatgatgcaatggctagatgattttcatcctgtgtctataaatgtgtgtgaaatgtacacacaaggtttaaaaaaaaaaaaaaaaaaaaactaaagcaacaactacaaaacccagatgtctatgaactcaccactgggcctaagaaattgagcattactagcaccgttgaaaccccctggatgtccttcctcaatgagagcccttctcttccacccagggggaacagcatcctgaattctggatggttttaccacacttgaatgtatttgtaaactgtgtattacttagttttgtctgtgtttttatataaatgaaatcctaatcatgtattcttctgtgacttgcttacttctcctgacattctgttcctgaatgtgacctatgttacaagtaatatgcagctatacagttccttcatgctcagtgctgtacaaaactttactttttttttttttttttttgagatggagtctcactctgttgccttggctggagtgcagtggtgccatctctgctcactgcaatctccgcctcccaggttcaagtgattcttgtgcctcagcctcccaagtagctgggattacaggcatgcgccaccacggtccagctaatttttgtatttttagtagagatggggtttcaccacgctggccaggctagtctcgaactcctgacctcaggtgacctgcccgcctcggccttccaaagtgctgggattacaggtgtgagccaccgtgccagaccaaaaccttcatttttaaagtgtccctccagccaggtgcggtggctccctccagccaggtacagtggctcacgcctgtaatcccagcactttgggagactgaggtgggagcttcacgtgaggcctggagtttgagaccagcctagccaacatggtgaaactccatctctactaaaaaaaaaaaaaaattagccaggtgtggtgccacatgcccacatgactcctcctccatgcatacatggtaggggctaagctctctggtagctcttataagggcaccacatcccaacagaccttgtcccacattcatgacctcatctaacccctatttccttccaaaagccccatctccagataacatcacttttggggttaaggcttcaacactggaattttggagaggacacaaacattcagtctctaatgtgataaggcaagttcccaccttgtttttcttcttcaggagtatcttggctgttcttagcactttgctcaaagttattgacatttttatgttggcttttcaggattttcaaaaaacttgttggttttttttttcctgaaattatgttaaatttaaagatcactttggagagaattgtcatttttaccatgtcaagtaagtaaacctgagttttccagtccatgaatgggatgtgtgtttatgtcatttttaatgccttttagtatagtgttataattttctcagcctccagactgtgagaaataaattcctactgttaatccactcactctgtggtattttgttatggcatcccaagcagactaagtcaccatatagaaatatgttatctatctaaaataagacaatgtgttattttctttcccaatggaacagaacagagagcctattaatagatgcacacataaagagacttgatttataacaaagctggcactgccgatcagtgggaaaacaatgatttttcaataactttgctgagacaggtggctacctacatttaaaaaatgaacttagacttctatctcatatcactttcacagagcaatccaggtggattctttgaaaaattatatttttataattcaacagaaaagtctcaatagatctaaaatatatgaatcacataggaaatgattaattatcctgattacattaaaactaagaacttttattcatgaaaaagcatcagaaataaaataaaaagacaagccaccaggtgaaagaaaatatttgcaatatactgaattgacaaagaattagtatccaaaatctataaagaattcctggctgggcgcagtggctcacgtgtaatcccagaactttgggaggctgtggcaggcagatcacctgaagtcgggagattgagaccagcctgaccgacatagagaaaccctacctctactaaaaacacaaaattagccgggcatggtggtgcatgtctgtaatcccagctactcgggaggctgaggcaggggaatcgcttaaacctgggaggcagaggttgcagtgagccaagatcgtgccattgcactctagcccaggcaacaagagtgaaactccatcaagaaagaaaagaaagatgaacaaacgaactaatgatcgagagaaagagagagaaacagagagagagagagagaaagaaagagaaagaaaggaaagaaagaaaagaaaaaagaaaaggaaagaaagaaaggaaagagaaagaaaaagaaagaaagaaagaaagaaagaaagaaagaaagaaagaaagaaagaaagaaagaattcctaaaataggccaggcgcagtgggtcacgcctgtaatcccagcactttgagaggccgaggtgggcagatgacctgaggtcaggagttcaagaccagcttggccaacatggcgaaaccccgtctctattaaaaatacaaaaattagctgggcctgatggtgcacgcctgtagtcccagctactcgggaggctgaggcatgagaattgcttgaacctgggaggtagaggctgcagtgagctgagattgcgccactgcactccagcctggacaacagagtgagacttagtctcaagaaaaaaaaaaaaattcctaaaataaacaagaaaaaggcaatctaaaagaaacatgagcaaaaaacaagaacaagcatttaacagaagggaagtataatagcttggccaataaataaagacggttcactaataataagagaaatgtaaattaaaatcctaataataacagcactgcacactcaccacagtggcaaaactggcaaaacagcaagtgttggccagaatatggaaaaactcaaatacctgtatgctgctgctggaagtataatttgggacaatcaatttgtaaaacagtctggcctcatcaaaaaaagccatatgtgggctcatactaaaattccaaatttttactcttcattccaaccctacagaaacatttgcccatgtggaccaagagacatgcacaagaatgctcataacagtacagtctgcaataccaaaaaaagcctatatttacttatttattttttagagttagggtcttgctctgtcaaccaggctggagtacagtggtgagatcatagcttactgcagccttgaactcctgggctcaagccaccctccagtctcagccttccaagtagatgggactacaggaatatgccaccatgcctggctaattttttttttttgggtagagatggggtctcactggtcttgaactgtgggctcaagcaatcctcctgcctcagcctcccaaagtgctgggattacagatgctggctaatttaaaaaattcttttgtagaaacaagagtctcactctgttgcccaggctggtcttgaactcctagcttcaagtgatcctcccacttcagcctcctgagaagctgggattacaggcacaagccactgcacctagcacaaaaactataactcacatgtccacaaagagtcaaaatgatactgcatgttcatacaaaggaatactatagggccatgaaaatgagtaagctatatggcttacatacaacaaactggatgaatcctaggaatactgagcaaaaaaagcaggtctacattatgattctatttgtattaagttcaaaataagatattgtctaggtatataggcatgtgtggtaaaactctaaagcaggttcctgaggattaggtactgggcagcctgcctggccacagacagcagggcggggaagagaagggcacatgaaggacacgaatgaatgggaagttgaaaagcaagacatcttgtgatagcagacaccactaactggtgaagagaaacagttctagagctgaaaaaaacttcaaggtaaaggaagcactattctcttttttcttttttttctttttttttttgagacagagatcattcttgttgcccaggctggagtgcaatggcacaatcttggcccaccacaacctctgcctcccaggttcaagcgattctcctgcctcagcctcccgagtagctgggattacaggcatgcgtcaccacgcctggctaattttgtagtgttagtagagacggggtttctccatgttggtcaggctggtctcgaactcccgacttcaggtgattcgcccgccttggcctcccaaagttctgggattacaggcatgagccaccacaccctgccaggaagtactattcttttcatctgtaagtaattgctgggtgaaaaatcagaagacctgtactatcctccagacctggactaccctctagatgctgccattaacttgtactacatctcagtcagggtgagggggctttaaaaaaaaaaaagtatggaaaaaataacaacttgcacaacatcaggcgagttttcaccttctatgggactcaggatatgaagatcaataaagataatgcatcctgaggagctgaagataagtaccttcaggggatgggaacagataaatttcaaactcatcacagtcccaagtaaaggcagatttataaagacaaagacactaaagacacttgaacttcaggaccccttacctgcccaagtccccttctaaggctctaagaagagccctaatcattttgtagtattttcctcaagagagtccacaaatggtacaaacttcaagccccacaaaacctacatcagctcctgatctgaatcccaaagtggtaaaatgcttatccacaggaaggggagactcctgtttaaattctctgcttctattcaatttccctgcctcagaaaaccatctcctaattcaaactagattcccctcagcaacaaagaaagtttaaaatttaagttatcaaaagactatgactaataagcctccagaaatccctggctgtgccctttatcttgcacagagaccttaggatacactgaatcttgctggataactcaatacaatgcaagactatttttctaacaaggccctctgctaagaaggtgcaaactaattttggcaaatatcccggctaaatattataattggctcaaggatgacacagcacaaaccacctctgtgttgtgcctacaatctgctttcaaaacactatgcaatcttgcctcaaggctggtagtattaccacatactccctgccttcagcaaatgttcttaactcctgggttctctgcaccaggatctggagaggcagaagtgcagggacagatgtgttaacaaatgccattaccactccagcagtatgtggatagaaaaccagaactccttgtgctttgtcttctgtgtgaatgaaggggcagaagctgaaccagtgatctgagaacagggagaggaatttgccaccggatagaatattttcaacaagaagaacaaatcatccagaaaggggatttgcttagtagaggttgaggaatttgtagagtaagtcagaactcctccctcacataaaggctatattcaacagggaaagaacaggagtcataagaaaatgttattttgaggaagccaaagaggaacttgcagtaaatccctgtaaaatccatgcaagaccaacaaggtttttgaggatttcatatgagcagaaacactgccagtttggattgaaagggacagataacatataaaattgaaggagactgttggaccctcaaaattctactggcaagaggcaggctgttaaaactgctcagctacaaacaaagtactacctttcactgaaaaaggaaggatgacagcggtgtagctataagctcagagggtggagccatgagcccagagcaaaccaagagcaaacagggtagaaccaagagcaccgaggcagagctgagagccagaattattcccaggccttgaaaccttatcaaggaactgaagtctgcccagctgaatttcaaagctgccatgggctggtgactcctttttaccttctgtttttcctctttgtgaacctgaagtctatgccagtcccaccttgcatgttgggagggctgcaggcagatgacttgtctctttagtttcgtaggtccacagacatggagagaactatgttcaggagctgtagacagattacactcccaagcctcatttacatgggacttagatgagcttgatcatgagattttagatatttaagcccatgagatttaggactttgaactgtagccataatgggatgagacccttgggaggaggtaacaagggacatgaattatggggggcagagggtgggctgggataggcaaaaacttgacatgctgatagccgaagaggaattagagagactcaaagtgtgtgagagattcaatacaagaaggttctttatagctgagatggagggggtcacaagagcaaggacttctgggaggaggagctgagaggatccctgtctgacagccaccaacaaaatggggacctcattcctacaagcgaaaggaaacaacatccttgctgagattgggagaagattcttccccagaggctctagataagagcctagcctggctgatgccttgattttgacctcaagagatctgggtccagccaagcctgcctgaacttctgacctggagaactgtgagataataagagggtgttgttttaagctactaaatttgtggtcatttgttacacagcaagagaaatgaatccagcttctgtttaggtccacaaattctatttctggaaatgctgctgccctagcccattgagagagctaactaacctcaggcagcaacaaaaggaccaggtacagttctgtgatcagcccttcctagcataaatttcctcatctacaaagtgggtgggtcgagagaaaagctgtaggaaaacatttctgtaccacaattgtgttcaaatagaagatgtattattaattacaacacccatgctgacatctgcaaatgagggacccagacatggccaaaaacattaaagtcatagctccttaccttcctcaggccaggactgtagattgctggaataaagatatgctccttctcctcctgttagataagtgcccaggaaagactcatccccctttaaaaacaacaacaaaaacaaaaatccaaaaaagaataggtgatttatagcataaatattcacagaatcaaaagtcctgcccaattatgtccgtctacaaaagctgagtcaggctcagatatgcccaatgtattccatggcctttggcattgtctggctctttggcagttactggcatccttgatttgtgctgagaaaaagaacattaagattctctctgagtccaggcatcaaagcccgcaatgcttgttcatgttccagtggatttatttcctttgtgaaaacagaggcagcttctccttggcctaaagccttgatgtctcagctctacatgtctaggccaatctgggatctgcttttaatattatggggagatttttaaaagaacaccagaaggccctgatggaataaagaatccctctaattgtatcccccataaatggttatttctaaagctctgctgggaaggggaggaatgcaaataggaagtgaagacaacatagtgcaagtcttttagattagtagtgagatgaagcattttaatacctttatgaattgcttacattattttttgatataatgttcacactgagaataagaaggctgcttaccctcactgcttgctgggttttctcagacaattttacttcattatcttccacctgtgtccaaaaggaatgcagattttcagtcaactacttcaagggaaaaccctgctaggtctccccactgtgttcaaatatttccaggacactggctggacagtccttccaccatgtccatgtccagtgctctcaggccctgacacacctgagatgtctgctggtcacctgggctcagagcccaaggccttggtgggctctctcactaggacctgaggtccagctaatgagcttatgacaagcagaggggatgtgttagtctccacctgtatttcacttcagaaaaaaacaactgtttttagggatgaagcaaagataatgtattaaaatattttcagatttaaacacgtttaggttagaggataactctcggtcttccctgtctgtgtgggaactgtagaagcagaatgtgagcactctcaagaagggactcagcccattagcagactaactgctgtcacaccttttacattccaaggccccagtttcagaccaagtccctcccactgcggaagatgggacttttctactagcagagagatgttgcagtaaaaactccgtagcaaccactctaccagggaagcaagtcacgggatccacttctcatgatttgtgtgaccttggccgggccgttcaactcctaagctcagtttcctcatttgtaaaatgaggctcttaatttcttcctttcctaatttaacagtgacccacgtaactttgttcctttcttttgaaacttttctaagattatgagagttaacggaactatgttcatttgtataaagagaaagggctgggatcaaaaattccattcctgaacaacagctagttcaggacctgacatcccaccaggggcccaacaaagaggctcttcctcaagtgttcaccctgatttctccacacgtaggtccacttccacctgatgaatgacactaaccagccaggagcagaatctgggtacagcagcagtcaggactacggagctggtttctgtggtaacagtgccatctgcaggaacaccacacacatgccagttaattccctaccagctcagcctgccttgcaggccccagaccctaaatgcccttctcaggagctagggttcttttttttttttttttttttttgagacagaatcttgttctgtcacccaggctggagtgcagtggcgccatctcggctcactgcaacctctgcctagcaagttcaagcaactctcttgactcatcctcccgaatagctgggattacagatgcgtgccaccatgccgggctaatttttgtatttttagtagagatggaattttgtcatgctagctaggctggtctcaaattcctgacctcaggtgatctgccagccccagcctcccaaagtgttgggattgcaggcaacatggcaaaaccccgtctctacaaaaaatatgaaaaattagccaggtgtggtggcgcatctgtggtccctgctacttgggaggctgaggtgggaaaatcgcttgagcccaggaggtggaggttgcagtgaaccgagattatgccaccacactccagcctgggtgacagagcaagaccttgtctcaaaaaaaaaaaaaaaaaaaaaccccaaaaccaagaaacaaaacttttgggaattagtccattttaccactactttttaatttttatcaaggtagtataggtatacatattaaagatcaaagagaattatcaggctcattctaccattctttagaatattttcattccttagaatataataaatctttagaatattttgccaacctaacaggtaaaaaaataatatctaattactgtttcaaattgcttttttttgagacagagtctcactctgtcacccaggctggagtgcagtggtgcgacctcagctcaatgcaacctccgcctcctaggttcaagtgattctcctgcctcagcttcccgagtaattgggattacaggcacccaccaccatgcccggctaatttttgtatttttagtagagatggggtttcaccatgttggccaggctggtctcaaactcctgacctcaagtgattcgcccaccttgggctcccaaagtgctgggattacaggcatgaaccaccacgcccagccttcaagttgcttcttcttgactactagtgagattacatatcttcatttataaatagtcctcctctcttttttgttttccacgtctgtgaagtgcctgttcattttttttgctcattttactattgggtagcttatcttttcttattaattttggaagagttcttcataaattaggttatacaccctttgttcatctttaatgtttctcttttttttttttttttgatacggggtctcactgtgtcactgaggctggagtgcagtgctgtgatcatcagttctaatatttttaccagtttattgttggccttttgccttagtttatagtttattttgccaaaaaaaaaaaaaaaaggcttaaggtttgctttctaaagatcacatatacttacccttttctttaactaagatctgagaagtcaaaaatgattcagagaaaaccacagatcctaaacaaccattgcctcccagtaagtcaggaatgtcatagacggccatacaagcctgcattgaatgagaaaccagttagatcagttaccagcccaaaactttcagagaagtccataagaatgagaccacaaatactgcctaaaggaacatggcaaaagagtactgaagagtttctagggaaaactggagttatcctaaatacatctttgaactgggaggtgactttaggatcacccaggcttccctgaaattgctccctgatcagagacacccttgggctataaggaaagtatccttatgtttccgtatattccctcaaattgctttatgctgactaggcacagtggctcatgcctgtaatcccagtaatttgggaggtcaaggaacccaggagtttgagaccaccctgaacaacacagtgagatccccactctactaaagaaaaaattaggctaggcataatgactcatgcccataatcccaacactttgggaggttgaggcgggtggatcacttgagcccaggagtttgagactagcctgggcaacatggtgaaaccccatctctactaaaaatacaaaaaaaaattagccaggcatggtggcgtgtgcctgtaatcccagctacttgggaggctgaggcaggagaattgcttgaacctgggaggtggaggctgcagtgagctgagatcgcgccactgaactccagcctgggcaacagagcaagactctgtctcaaaaaaaaaaaaaaaaaaaaaagaaaaaaaaatagccaggcatggtggcgtctgcctgtggtctctgttattcaggaggctaaggcaggaggattgtttgagcccaggaggttgaggctgcagtgatctatgatcatgccactgcactccagcctgggcaacggaccgagaccccgtctcaaaaaaaaaaaaaaaaaaaaaaaaaaagcaagaaagctatcaagcttttatggccaagacaaataaaagctgaggcttcagtagcctggaaacaaaattagaacaactcagagagctcccaaatgtctggtaagaaagccctaatttattaggtaaaaactagtgaaaatgaaacaattccgggaagaagccagcagaagaaagagaaaatgatgttagctagagctagagtctgtgatgaccaggaagatctgatgagggacatgggataagtagcacaaggacctgtcccctcctaccctgaatagtagtgagcggtgggtgctggtgcagatctcctaagtccactttcacatattgtcgtcctagcctgggacgcctgtcccaccccttaggacagagacaaaagatctgaggctcttgaacggattgctgaattttcaaataaaaacttaaagaggccacaaggttgaaaggaaaaaaaccacagttaaggccaaagcccttaattttccatattattatgataataggatatacaaaagagacaagtaggcgtctatatttgaattaactttcctttcaggtttgacaactggaaggtttatctaaagctgtctcaaaggatttcgagcatctgaagacacagaaccctcctgagctacatggtccctcttaagtgacaatggcaatcctatgtctttggttcccagaccaatcaggtggacagatcctgggggttcctgatccttcatgttcatatttggccactggtattgaggaagggaagagaggatattaaaaagataacatgtagcatttgttggacacttgttatgtacttcccaccatgtggcacggggaaagaaaaaatacagcatggtgcctgtcttcaggaaatctataatgtatagctggagaaacaagggcattcttatatgaaggtcatcatatgacacattatgatatcatatgacacattaggatataattatttcttaatttgtgtagtacaaactgcaactgcaaggactataggaatacttgtagggagaaatcaacagggaaggctttggggaggatatagaacttcatctctggataagaggacagaatgtagacaaaaagcatcaacttcctgcctcttatttcctatctcattagctgtgcatacttgacgcaagactatgattttactggattcctaatcacctgctactatgcaaagcatcttccaaagcactgctcaagagtctaaggagagaagtcagggatttaaagtctaacaaggagataaagtattatcacctaaatatcagaaagtatttcccaatgttttaatgatatcacaaaaaagtctaaactagttctaaaagaacatccacacaaaatgttgacagatggggaccaggaacattataaaaacataaattacaaccttaaaaaaattacccttgttgtgctattctctgtagataggttaacactactgacaggaacttttgagttacttttccacaggtgatggtgatggggatgcgcttgtaccaaattatccactgggtgctgctcacccagttccctgggaccaaagctttttcaaactaaggctcaggcagtggtcacagaacagactcaagatataacacacaccacaaacagaatcttggctagatatgtactaccctctcatgtaccatttgccaatcttcttcacatcaggatgttctggggtaaagggaggactcagcttgtggctgagaacaactggcctagaaactctggctccccttcgccatgccatcccaccccagggaccattatctcagtgcatctccaaaccatgcccccagcacacaggttggaaaacgttgctctgactactctacttcatggcagacccaggtccctgttgattattggccatttaaataattatagtcatgtatcacttaatgacagggatacattctgagaaatgcatcattagctgatttcatcactgtgtgaacattgtagagtgtacttaaacctagatggtgtagcctactatacacctaggctagctggtatagtctattgctcctaggctacaaacccgtacagcatgttactatactgaatactgtaggcaattataacatgatggtaatatttgtgaatttaggcatatctacacatagaaatggtgggtaaaaatacagtattatgatattatgggaccactgttgtatctgcagtccactgttgaccaagatgtccttttgtggtacaggactgtagttaattttctcaggttccctgtttttgtttgtttgttttctgagactaaatctcactctgtcatccaggctggagtgcagtggtgcaatcacagttcactgcagtctcaaactcctggactcaagtgatcctcctgcctcagcctcctgaggaggtcgggctacaggtgcatgccaccacacctgcctaattaaaaaaatttttttttttagacacggggtctcactacgctgtcaagactggtctcaactctaggttcctgttaaggacatcaatgcaagtcttggaactcaaagatgccactgaaaaacttagtctgttagtcaaggcaagcttgtcctggattcacatttcgacaagagcaatctcagctacctgtaggaaggcttcataacccagaaagaggtgcctcccaacacctcagttaagactctggacactggggaagcctaggcaagggagaatagatgtgggtgggcctagcacagctacctgggtaccttcagtaaacacaggctcacccctgctatggctgggataggactgagagaagatcagcttcttcaggtggggtgggctgcccaagacccccacccactcccacctcccaacttacagatgtccctctacaggccattcccagccagctgacccatgatagctctgcttaccgtcttcacaaaggataagctatcttcactgtccagcggtacaattctaggaggggaaagagatggaagactatgttaaagagtttttaagtgtacttaaatttacagtgtttgcttttttcaacttggcaatgacaagtcatagattcggattgctcttagggcctttcaaaacactgggttgcatgtctgtagaattggtatgtgggccactaaggtgagtatgtccatccccacctctgcccctcagctctgcagtgggaagcactcagggtacaggggctcagctgagcacagccagcccaagcccaaccctggagtgatgtcactgctaggtgtggaagcatgagaaaaccactcatgtcagcagcctcccctctctttatcttcctaaaacttgctccatgtaaggatgcaccacaatcatatacgcaccttccctgattattcacagcatgtatatgaaaagtcatcttggagctgtagaccagaaacaaaacaaaagaaaaatcagtctgctcctgctcctcagatacctgtgcagggtacctgcttgggattctcaaggccacacagtgaggtgtgtgtcatccttgctttacacagatttaccctattttggatactttccccagggtcccacaccaccagcaggtatgaggccagaatctgactctaatcacagccctgcctctgtgcaagtcctaaggacggtcttgactcttggaccacaacaggagaaaatgacatgagaggactgctgctcactgcagactgagaatgaccctccatccctgctctgagcgcaagcagaggccacgtctctgcaactcacagtcaaatgctgtggagccatgggtgaggccttcagagttgagaaataactagaaaaccctttcagcttactctaacttgtgtaagtgtaatctcttgcattaacacatactagatagctacacactaattactgtctgcattcatggctcccactccttcccctcttgggagaaagagatctgctaacctgaagcagtttgagggtcctcagtgaagtaatctttttttttttttttttttttttttgagacagagtctcattctgtcacccaggctggagtgcagtggcgcaatctcgactcactgcaacctccacctcctgggttcaagcgattctcctgcttcagcctccccaatagctgggactacaggtgtgtaccatcatgcctggctaatttttgcatttttaatgaaggcggggttttgccatgttggtcaggatggtcttgaactcctgacctcaagtgatcgcctgtcttggcctcccaaagtgttaagattacaggcgtgagccactgcgccccgccctcagtgaagcaatctttgtggtgagaaaggggaggggctctaggtggaagactggcctgggggacttttctcccattgactggtgttttcttcttgtgcctttctccagctagggcagacacctaggcctaggaggccttgggactgagagggggcctgctctggggaggctgagtggcctaggcaagggcccaagtaaaggagaagtagaatgactatgccagccatattgatggtaagagaataccccactgtgacagcagctaacatctatgtgcccaactgctttacaaggtgggtagctgaaggagcagatacagacagttcctatcttgcccaaggtcacacagatgcaaactgaagaagcgttctcaaattcaggttggccagaaacagatagcacagggcagcacaaggtcttaagggaacaaacttcctttatcctttccctttcatggccagggcagcaagatccagaagacccaggggaaagaagacctgaagcaagtctaaagccctgcaccacagagttctggctctttcttccactcctggggctgcagaaatagaattctttttgttagaccaattaattgactaatctttcaaatactctctcttattacacaggactatagatttaagaaaatgtgggacatagacctgaggcatcacaggacacatcctagaagtattcttaaataaattccccagtattggtgtcttttgtatcctttgtataaaagtgcacataatggtcctcacgtgaaacagtggttaagtggactgggttcatgaagatttagctatggataacaaccaccgtgacatgctgggagatgtgatggaaaaatcaccagattctcagatgatgcagaccccaggacacggccaggctcagggtttctgtcattcaagagacagatgaggcccagtgcaagtttcttctaagcagtgactatcttcctgtgcccagggccctctgcccctagaaacctcaccattcaggtacccagctttgcctttctagccttggaacccaggcttgtcaaatctcctgtgatgctggtgttaatctgccctgcattctaacctcagaacatgtgtgtgactttctcaaacagttcctgcatctttggctctttggcttctaagtgaaggctgaatcatgaatgattctccttcacacatcccattattttactgaaacatttctcaaaggggagatgaaatctaaattataagggaaaaaagaatattccaaaacgaagaaaaaaaattccttataaaaaatatcagccattgcttaccgcagggctgccttaaacggaatcaactcaaaggaatctaacccagatcccagagtttgctctgctacctccttggcctgtaaaataataagacagcgacaattagctttcacagcaggaaaaagtacacatatcactgatggaagggccctcctaacacttgtccaggatcacaccatgccctacagtgtgtccttcccatctatgtgactacttggtaggcatgaatagattaaagtgaaagtatcatgttaagggaaagaagggcctgctttctccaggctaggtttacaggacaaaactgcattcaggcaggtgtgcactggaacctgacgtgctggatccagagaagtgaccagctgtgatgacagcagtggaatgtgaggtctgtaaaagtgctttctcctcccctcttccttggctcttgggaaggaacctctgccctcagagttttagccagatgctaagaatatccaaatagcaagagttacaaaagatcagttaaaaaacaaagatgtgagaactgatattgaaggacaccccactgctttggataagccttctgcatgtagtggctaaagggctgagaaatccggagtcagtaccagggatacaagttcagtgaggaggggagatggcaaggagctggtgactacagctacagtctctctgatatctacatcatacacaacctttccaatgtcaaatggcttccttcagaaaaggtcctattggcatttgggaggcatcaagctgactcttctcatctccttactgggtcagatataggaatccaactcagcagggcaggttaaccgcaaaacagcaaggaagataatggtcagagaacgggaacacatgtgcttgtctaggaaaagcaagtcagattttctaatctttagctattttttttaaacactgagttataggaaatcaaacttaccaaactttattagatttcacagtagaataatctaaagttgtctttttggttttttttttttagcttttaaaagacttttgtttaagctattcaacaaaacaatgtgctacagaatgatttttccttaacacaaccagatgtctacaaagaagcaccgattagttgtcatccataagacaacagcagcacagtcacaggcagcagaagctcagtgctctcagggcttctctctgcctggtgtcaaagaggcccaagctcgcacaaaagtgagtactacaagatgtccaaagaagaaacacatggatagaatgttttacattaaaataataattacagaaagggaaacatggtatttaaattacctttgttagactggaagttttagcataacatgcaatgccagccaaaacagcctcaataacagcagcatatatctgggacaatagcctactttaaaaacaaaaaataatggttaacattacagcatcatgaggtttttgtcaaaagatgcatgcacataaatgacagcccctaagaaactgatttttaaacagaatgaaaaaaggcaaaaatataacccactgatttctaaaccttttaaaagtcacatgcctgggccaggcatagtggctcaggcttgtaatcccagcactttgggaggctgagatgggcagatcgcttgagcccaggaatttgagaccagcctgggcaacatgacttaaccccatctcgacaaaaaataaaaataaataaaaataaaattatccagaaatggtggtgtgtgcctgtattctcagctatttaggagcctgaggctggaggatcacttgagcctgggaggcagaagaggctgcagtgagccaagactgtgtcactgtactccagcctgggtgacagagtgggaccctgtctcaaaaaaaaaaaaaaaaaagtcatatccctggtttgacttatactttgcttttgttaaatcaccttaaggaaagtcggctcctctgaattctgctcaagagactgcccctccctgtttgtaaccaaacagaataaaactgtgtagactccttgactcctctatgtgcaggaacagctacctacagagcaggaattccttcagtgttctcatacccacttgctgctttcccagggaccaatcatactgtagtttcatatcgtcttttcactagacctgctgaaggctggtctattactggaacctccgggtaggagacctcagcgggagaagagagatgaccagactgaggaagggctgggtttttctctgccagaatggactgccacgaaggtccctagaaaaaccagtctggttcatttcagggaaccacctaaggtggtttttccaccttggcatttaggactggataattctttgctgtgggggtttgtcctgtgcattgtaggatgttcggcagcacccctggctgctaaccagcatccctacccactagatgttggtagcattccagttgtgataatcaaaaatttctccagaccctgccaaatgttcctgggagtggggaaagatgggggagggaggtacaatagaattgcccttggttgagaaccactgccttggaggaaggaggtgcaggctcttcttaggacacttacgaagagaaggggctcatccaagggtccctgaaaggccaggagaggcatctggcaaggaactgacaaggtctcacctaaaaatgtgtctatttttaagcccataagaatcttgtaaaggaatcaggtaaaggaaggtgataggagtttgaaagtgggaaaaaacacagaaatgatttggtctaatcctctcatcttatagaagaagcaataagggcctctggaagtggaatatgttgtctattaagtcacagaaaattcatggctgacccaaactcagatctgctctcagcctggtgcttttccactgtgccacatcacattgccacctccttcaatttcctccttggctcctgcaccacatgcaggacatgacatgtcagctccaagtatcaacatatcctgaagacttctggccaggcaagggcagggcagagggtataccctggaaggggcctggcagagagatgtgaatgagcttggccccttccaggtgagaccagaatcctctacactttgacactaagggtgcatttaaagatgccaaacccaaagacatgcaaagatatccccctcctcagctgattcaaacatcactcggtaccaacactggtcaggccttccccttgcttggtcttctcctatactgatccttacataggagatcaatacacaagccacatggccgctgacccataaaattaaaaagcctgcatggctctgttttttttttttttttgagatggagtcttgctctgtcacccaggctagagtacactggtgcgacctcagctcactgcaacctctgcctcccgggttcaagcgattttcctgcctcagcctcctgagtagctgtgattacaggcgcctgccaccgtgcctggctagtttttgtatttttagtagaggcggggtttcaccatcttggccaggttggtttcgaactcctgaccttgtgatccatctgccttggcctcccaaagtgctgggattataggttataggcataagccactgcacccggcctctgttgtcactttcacttgaatccacatgttccactggatctgtgatttggcaaatctcccaatgtgcacccagttaccactcaataccagtccctgacatggggcatcaatggatttggtttaggcaaaatgtttaagggtctagcataaggatccaggacagtggctaagcagcgctggcacagaagtacaagcaggcacaaggtaagactacacccaccaacgtgaggaaatggttgacttgttgctaaggaaaggaaacccacaaaagaactacatacacactatgattacagcttaatactttttttaaaagcccagaaagatatatacgtatacatacacatacacacacacgtatacacacacacacaattttccttttttttttttttttttgagatagagtcttgctctgtcacccaggctagagtgcagtggcgctatctcggctcactgcaacctctgtatcccaggttcaagcacttctcctgcttcagcctcctgagtagctgggattacaggcatgtgccaccacatttggctaatttttgtatttttagtagagacggggttttgccatgttggccaggctggtcttgaactcctgacctcatgtgatccacccgccttggcctcccaaagtgctgggattacaggtgtgagccactgcacctggacacacacgcacatttttgagacaggaactcactctgtcacccaggctgcgtgtagtggtgtgatctcagctcactgcagccttgacctccccaggctcagatgatcctcctgcctcagcctcccaagtagctgggaatacaggcgtgtgccactatgtccagctaatttttgtagagacagagttccacagggtttcccaggctagtctcgaattcctgggctcaagccatctgcctgcctcggccccccagagtcctgggatttcaggtgagccactgcgctcagtcccagaaatatataaattaagatactaatgggtagtgccagacaggaggaattatagctgatcttaatttcgtttctctaattccatattttctatagtatgattatatttcttctattatatttttcccaatacaactttgtgggccctgccctagaaattctgattgtaatcctgggattgggcctggagaacctatattttaaagagatctttagataatcctttgtagcctctcactgctggtcacagggaagtgttgatctagaccccaccaagttaagctgcagtatttaattaggtaataataaaattccattatgtccatattgctgaaggacaatgctttctggaatttaatagtttcagcactaatgagtttattttctgtctttggtttcctgctgtatgtgaaagaagagaagtcaacactaggtagaccctttctgaggttgcacagccagtgttcacaccctctcactatgttccataggcttaagtgtcaaatccagagaaagacactcttcagaccagttggggtttcacatgattctcccaatggatttcaggatggtttattcttagaaaagcccttaatttaaaaatgcattatatagaaaacatatcaaggagagttacatcataaatgcatgggtgtgcaggtaagaagtctctgaaatctagagagaagagcagatggcaaagctggcaaggttctctggcctgaattccaagctgagagaaacttgggaaacaacacagtaatgttcatgtcataaaccagatgtcttcttcttcttcttttttttttacacagtctccctctgttgccaagagtgcagtggtgcaatcatatagctcagtgaaatctcgacctcccaggcttaagtgatcctcccacctcagcctcctgagtagctgggaccacaggtgtgcaccactatgcctggctaattttttattttctgtagagacagggtctgcttatgttgcccaggctggtctcgaattcctggtctcaagtgatcctcccacctcagcttccgaaaatgttgggattacagtgtgcgccaccacacccagcaaaagcagatgtcttaatcactgttgatctcaaaaggaagtacacaggacagtcacaactgagtaactcaactttgagaaagaaaaaataaaatatgaagacttacatttgttcagttttcttgggcagcttgctgtcaccacctgtgaaagaggcccactaagaatgtgacaagagcacaggatatgcaaacacttaacaaggaagctagaaatgcttaatttacctggaaggcattgtcaagaactacacttttttttttttttttttgagacacagtttagctttgtcgcccaggctggagtgcagtggcgtaatctcggctcactgcaacctccgcctcccaggttcaggcgattctcctgcctcagcctcctgagtagctgggattacaggtgcacgccaccatgccccgctaatttttgtgttttcagtagagatggggttttgccatgttggccaggctggtctcaaactcctgacctcaagtgatccacccacctcagcttccaaagtgctaggattacaggcgtgagccaccatgcccagcctacttttttcttttaagttaaatatagtacaaacaccaacaacagtggaacccggccattcccaatagcctcctgaaccttcacccgcattttccacttttacaacccactcagcaacaccactaaataccagagatgtgtggaatcttaggttctggaatgtttttgtttttatttttaattttttaaacttcgagacatcagtaaacaggctcagttctacctcttgctttatctccttaattacctgacccaagttatgcttctttccagagtttcctggcttatttaacatcatccagaataaaatacggttcctgacgtactctcctctgtgtagcaatgctgagacctgcgttcattccataggttcttttccatgtgtctttggatacctgcaacttctggttaccccagtaagcagggcagccccagcaagcctagcctttctggatggccccacagcatgctcctgctcctaagtacccttttattatggcctcttctcactttcctcacaagaacagtccagtgggcacctggctgagtcatccaaattcccactgcggaccccacctcttgcttttttgttgttgttgttaagacagagtctcactctgttgcccaggctagagtgcagtggctcaatcttggctcactgcaacctccacctcccaagttcaagcgattatggtgtctcagcctcctgagtagctaggactacaggtgtgcaccagcacgcctggctaatttttgtatttttagtagagatggggttttgccatgttggccaggctggtctcaaactcctgaccttaagtgatctgcctgcctgggcctcccaaagtgctgggattacaggcgtgagccgccattcctggtccctacctcctgctttcttaaactaggtcttattcatcttggcctcccctgtgacacctagcaaagggttatacacatggttagacttaatgtaggctgcaccaatcatcttcctcttgaaacacattctgtgagaaacgtgttagacatatcaactatccagaagtaatcagagagggagctggaggcccacaaattgggtaacctgagcttccaagcaaagtagtgaattgtatgtcaacttctagttcatgggacagactattcattagataagctgatgagatgacaacttatagggacttacccaagtaaggaacatgagtagctccaaaaaagtatgttctcgaacaagcaagaggtccctttggtgagacacactgggctacctggatgtcagaaaaaaataaaaataaaaaggggcaataacttaggcatgtactagtagataaacaaaaagtatagagtcaatggaaataaattttctttttttttttttgagacagagtcttactctgtcatgtaggatggagtgcagtggcgcaatctcagatcattgcaacctccacctcctgggttcaagtgattctcctgcctcagcacccccagcagctgggagtacaggcacatgccatcacacccagctaatttttttttttttttgtatttttagtagatacagagttttgccatgttggccaggctggtctcaaactcccgacctcaggttatctgctcgccttggcctcccaaagtgctgagattacaggtgtgcaccactgcacctggccagaaataaattttcttctacaaaacagatttattattttttaaagacacaggggaaaagatgatctttaactgtttttccaaaggtatcttttggtgcgtgtgcgtgcgtgcatgcgtgtgtgcgtgtgtgcgtgtggtgtgtgtgtgtgtgtgtgtgtgtgtgtgtgtgtgtggtttaaaccttggctatattgtgagggtgctgttggatactcagttagcccagggatgctagggcaatcatgattcagaaggaaaaaggaagcaaggtgtttgggttttgactgtcattaatacttagtccagagctttcacagtgaagcccctggctgacatgacaggcagaggtgtgggacagctccaaattcaggaaaggatggtgctatccacatccccacaaccatttgtatttcatctctgtacatagaccctgcggaagagaaaataagttcctctaggttttcaaatttttattcttcttccctgttaagatgttcattgatacagagataaaatagatgtcctttcctcttctgaaaatccaacatctcatgagggttcctagaataataggtataaaatgcaaaaatactaccacaagaactaaaggaacattagtaagtacaatatacaaaaagtagctaaatacaacacaaatactcattccttctattttactcaattgtttaagacaacaacactagaattcaaggcatttttctataacattgtgaatccaagttacagattggaaatgagaacttattctaactaagctataaaaaagttactaatagtgaacatcatcaatattgccatgacaatgaatgaaaactcatggaggtatttctaattgctggttgatacatatttcctcaattaaaacatgttccttggatctccaattttcccttattaaaggttttttttttaaaggtgccaagtgtttgtgctatgaattgagttaaagtcacatggtttaaaccccagatttgaagtgacacagttctctttcacttgtgtacacttgagtacgtgaatctgaagtctatctcagtcagaagatcaacacaccagcacaggtgttggccagtagaatgggatctatacacagagtcaacatttctctcaggaaagaactttggattgtcttaagtagttaaaataagtaactgtctaaaccttggtgtcatagagcacgactcttaaaaacattttaagtcaggctgaatcaattgcgagctttcctggaagactataaaaaacaagaagaacctcaagacagcttcattggatgtctggtgtaaaggtacctatccttgtattcaaaggaagattttgaaataaataagtaacaatatatatccagataatcttacccacagccttggttttaattacccccttcataccaagggaatgctcaaatgtttacttctagacaagactaatcctcgcaaccctagacttatgtatctaacccactgccgcctcagctccactggggtgtctcacggtcatttcaaactcactgtctaaagtgaacttcacacacatccaatctgactctcctcagtgttccctctccaaatgaatagtttctttgtccactcagtacagacatcagaatcttggagcttccatggctttttgtggcttgacagctcttttctttttatccctaaatagcatccattcacttactgaaagacatcttggttgcttctaagttttggtaattataaatatccatatgcaggtttttgtgtggacataagtttttaattctttgggtaaataccaaaaagcgaaattgctggatcttatggtaaggctatatttagttttgtaaggaaatgccaaactgtcttccaaagtgactgtacctttttgcattcccaccggcaataaatcagagttcctgttgctccatatcctcaccagcatttggtgttgtcagtcttctgaattttagccattctaataggcgtgtaatggacatctaaattattgctccaaacatttcctagctggctctcaagtcagccccaggatgataagaaattcacgactcagaaggaaaaaggaagcaatgtgtttcggttcaaacatttcctagctggctttccctggagttttcaagtctatgagatcctcaaaggcaaagatcatgactatcccttcatctagcacagtgactggcatttactagacattcaacaaggattactgacttaatgagtgaaaactctttggctttggagtgatacagacctgagagcagaaattgcttttataatacaatctataatgtggatatacactgggtggttttttatttttatttttttggcaacttttgagataaaaccattttaaagtatataattctgtggtacactgccttgatcattttgttctcttcccttcctgatgttccaagattccttcttttatcatttcctctctgtttagaccaaatttctttaagttattcttttaggtaggtcttccagcaacaaattcttgtagttttcgttcatctgtgaatgtcttgattttcccttaattctagaaggatatttttgttagatacagatttctaggttgacaactcttctctttcagcatttgaaatataggtgccacttccttctggccttcatggtttctgatgagaaagaaatacaactttcactcaaaaattgttggccgggcatggtgggtcacgcctgtaatcctagcactttgggaggtcgaggcgggtggatcacctgaggtcaggagttcgagaccagcctggccaacatagtgaaaccctgtcgctactaaaaatacaaaaattagccaggtgtggtggtgggcacctgtaatcccaactccttgggaggctgaggcaggagaatagcttgaacccaggaggtggaggttgcagtgagccgagatcatgccactgcactccagtctgggtgacaagagcaaaactccgtctcaaaaaaaaaaaaaaaaaaaaattgtcttccccctatgggtaaggtgctatttctttctggctgttttcaagattttttgtttgggctgagcgtggtggctcatgcctgttatctcagcactttaagaggccaaggcaggtgcatcacttgaggtcaggagttcaagaccagcctggccaacatggcaaaaccctgtctctactaaaaatacaaaaattagccaggcatggtggtgcgcacttgtagtcccagctacttaggaggctgaggcatgagaattgcttgaacccaggaggcggagattgcagtgattcaagattgagccactgcactccagcctgggtgacagagcgagaccccatttcaaaaaaaaaatattttttgtctgtagttttcaacaatttgactttgatgtgtattggtgtgggtattttggggtttaatcctgtttgaggttcactcagcttcttgattttgcagattcacagttttgcgtttttgtttttttttttttttttgccaaatttgggggaatttcaacctttatttcttcattttttaagtctcatcttcgttctcctctccttctggtactccaacaatatgaatatttggattttttgtgagagtcccacagctctctgaggttttgttcagttttttttttcagtctattttctgttgttcagatgggtgatttctattgttctatcttcaagttcattgattctttattctctcatttctgttttgccactgagcccattcactgagtttttaaatttgactactgttatttatttatttttgagatggagtttcgctcttctctcccaggctagagtgcaatggtgcaaccttggctcactgcagcctctgccacccaggttcaagtgattctcctgcctcagcctcccgagcagctgggattttacaagcgcctgccaccacgcctggctaatttttctatttttagtagagacggggtttcgccatgttggccaggctggtcttgaactcctgacctcaggtaatccggcctcccaaagtgcagggattaaagttgtaagccaccgcgcctggtctatttttactttaaaaatctcaatttggttttcctttttcttttttttttttttttgagatggagtctcgctctgtcgcccaggctggaggcagtggcacgatctcggctcactgcaagctccgcctcccgggttcacaccgttctcctgcctcagcctcccaagtagctgggactacaggagcctgccaccacacccagctaattttttctatttttagtagagatggggtttcaccatgttaaccaggatggtctcgatttcctgacctcgtgatctgcccacctcggcttctctaagtgctgggattacaggcgtgagccaccacgcctggcctcaatttggtttttctacacatcttctatttcgttgttgaaactttctatcatttactccaagggtatttgtagttgctcactgaagttgtttttttttttttgagacggagtcttgctctgctgcccaggctggagtgcagtggcgtcatcttggctcactgcaacctccgccttccaagttcaagcacttctcctgcctcagcctcccaagcagccgggactacaggcatgtgccaccacgcccaggttctttttttttgttttttttttttttggtatttttagtagagaccaggtttcactgtgttagccaggatggtcttgatctcctgacctcgtgaagtatttttatgatggttgctctaaaatccttgtcagttaattctcacatctgtgttctgttagtgctggcactgatgactgtcttttctcattgagtttgagatctctagtgatttttcaattgaaacatggacatttttagtggtttccctggagtttgtgatataaattaataactaatcgaagtccaccttcaaattacactctatccctttgtgtgtagtgcataaaccttgtgtcagagtactcccatgtcctccctcctgtgtcttattacattgctgccactcactcatctacatgctgtaatcacctatacagttactattattagagagttatcttttagattagcaataagaaaaataaaaggtttcattttatcttcatttattccttctttgatgctcttcctttatgtggatccaagcttctgatatatatatataatatataaaatatataatacataacatatataatacatattatatattacgttatatataattaaaatatataatatatgcacacatacatagtgtatatataataatatatatacacacatacatacatacacacacacatacataaagaacacttaacatttcttacaggacagatctgctagtgataaattcaatttttttgtttgagaaagtatttctcttttgtttcctcctttttcttttgaaggataagtttgttggatataaaatgtggtttggttggtgtgctttttcattcaacactttaaaatatcatttcactcttttcttgtttgtatggtttctgataagaagtcccctggaattttcatccttgttcctctataggtaaggtgttttatttccccttttggcattttaagagattttctctttgtctttgatcttctgaagtttgaataggataggcctacacatagatattttgggatttatcctgcttggtgttctctaagcttcctgggtctgtggttttgtgtctttgtcatgaattttggaaaattcttggccatgactacttcaagtacttcttccgtttccttctctttcttcttcaggtattcccagtacatgcacattataccttttgaaattgtcccagggttcttggatgatttttttttttttttttttctgagacggagttttgctcttgttgcctaggctggagtgcaatggtgcgatctcagctcactgcaacctccgcctcctgggttcaagcgattctcccacctcagcctccctagtagctgggataacaggcgcccgccaccacacccagctaattttttgtatttttagtagagatggggtttcactatattggccaggctggtctcgaactcctgacctcaggcaatccacctgcctcggcctcctgaagtgctgggattacaggtgtgagccactgtgcccggctggttcttggatgattttttttttctctcattgttttcttctcttcacactcctgttcgggaattttctattgaccaatgtcacgcttactgattccttccatggatatgtctgctctactgataagcccattaaaggtatgctttgcttctattacagtgcttttgaatcctagaatttccttttgattctatcttcaagtttccacctccctgtttacactattcatctcttcttacatgttgcctatgtgttccattagagcctttaacattaatcatagtcatttttaataatctgtatattacaaaatatgagtcatatctgagtctggttctgatagtcgcactgtctcttcaaatagtgttttttcttgccttttagcatgctttgtaattttttgttgaaagccaaaaatgatgtatcaggtaacaggaactgaagaaacagacttttaatgtgggattttatgttaatctggctgggagttaggttctgtttaatgttttctgaagctgtaggtgccagggacttcaaatccctctagtattcttctatttttcttccccatttttcttctttgggttccctgtgaactccatcttagatgtaccttgcagctctgtcagcagtaaccccctattatattgtagacctctgctaaggtaatgggggagggaaacattctatgattttacggttaaatctcagtcttttagcaggcctgtgtctccaggctgtgatcatcaaaagtgtttcttagctatttccccctctcctagggaagacaggaagcctacagtggcatgtgcctgtggtcccaactattcaggaggctgaggtgggaggatcacctgagcctgggaggtcaaggctgcagtgagccaaggctgtgccactgcactctagcctgggtgacagagtgagaccctgtctcaaaaaataaacaaacaaacaaaaaaactagtacctactaaccacagctttcctgattgccagagacattttgaaaatactcaaaattccactgagatagcatagactttcacaatctaagtctcatattcaggtctaatgttttctttaaaagaatgtagcagacaatctgccaccaaatgcaaaaatcttctctctggcactctcaataaacaatgatcatcaaggttggcttctgtccttaaatgttaacagtcaaggcataacaaacttaggcttggaataactatcttcaaattattttgaattttaaaaattctattgacaatattactctgacaacttaaagactggtttgtgaaactacgttcttaacctttttccttcaagtatttcaaaattaaatgtgatgctttcaaatcatacctagtttgtactataaaaaaagtacaaacagtttctaatcacttcttttcactctagaacaacttcaaattcagggttaaatcaacacactaactggaaaaggttctttttgtctagctccccccacccaccccacccccacaacttgataataaaactaatcaagcaccaggcagtccagccacttaccatgtgcttggcaaagctcccgccgggaccagtgcttcgtaccagatgtccttcagaagggaagttaaagttgccagcattcaggttttctcgtgtggagtgattaccaaagagaacaaatggctgccggttagggctagagagggaagtcaaaaacatgtgattagaaaagagttcctggccaaggcaaccttccatgaccttaataagtcctcaggcttttctgagggacacttgcggcctgagcaaagtggtcagtcagtacagtcgaccgaatatccttggctggttggaaacggatgccagctgtctccctactgacccacagggatcagttaacatttagggacataactaaactcaagctaggtttgtattttcagcatgtcccactttttgaggaataagttccataagcttgctgtccatgatacagtgatagagcaaaactccggtattataaaatagaattttaatagaaatatgagtcttaaaggatgacagttatgatacttggactagacagacaatagggcagtcaccaattcctgagtaactttcaatagggaaggagcacaggagggttgcaaattttctcaataccacacatacctggctctgtacccacccccttcctccctgtcctcttggctgaacttttcctctcccctactttctgctcactcctcagcccactctaatcagcctcctcagtcatttcacccagagagttcttgccaaagtcaccaagtgacttccatgtagcatacagcaaatccaacagatagtcttcaggtcttccttccttccttggtctctgagaagcacttgactccctcccaccctccactgcaagaactgcagtgcaagactgcactcccctcagtctccccagtcagtcaccctcctcttccacctggtctccgaatagtcccagggtttacctgcagcttgctgctccctcctctcctctgtgatgatgttccctatgtctgctccccttccagttcttgcaggaaataaacggcatcacaatccacccaggtacccagccatctgaaaggcctccttgacttctgcttcctccgccttcaaatctaattaaccttctcaaaagccttcctatttaaccattttcttccatcttcatggccacaaccttagtccatgctgccatgatttcttccctggacaactgcaacacttcctcactgtttccctgtttccactcttgccctcctataatggattctctacattgcagtgatgataatatatatacatatttttttgagacggagtcttgctctgtcgcccaggctggagtgcagtggcgcgatctcggctcactgcaagctccacctcccaggttcacgccattctcctgcctcagcctcccgagtagctgggactgcaggcacccgccaccacgcctggctaattttttgtatttttagtggagatggggtttcaccgtgttagccaggatggtcttgatctcctgacctcgtgatccacccacctcggcctcccaggtgataatcttttaaacgtgccaatttactgcctttatgttattttctggagaagggccacaatcttgaacatggctaaagagaacttgtatgatctggtgaactttctcagctccatagaaggccactcaactccaacttcaatactccagccaagataattttctctgatgtcccttatgttcttgtctcagggtctctgctcttcctcctactcccatttatctctgttcattattcagctctctcctgcagggggctgggctctcctgtgatgggcttcaaagtactatgctcttttctccttcatggcaccaatcagagttggtaataacagatttctttgttaagatgtttgattaatgtctttttctccactaccctataaactttatgagggcagtaatcatatttgcttcctttttttaaaccatgaatctctcttgattggtatgtcgtagttctcagtgaatatttgatgactctatcctctatcttcttcctaaattgccctcagtgagcgccatgtaaagaattatttgcatttcttttcactactcttaaaaatactaccttaagctacaggcaaacaaggcttttaaaagtaagcatggctgattttttttctgaagcttaattcaagctaggtgacactttgggcagaaaaagatgactctgagtcctagccagggtactttgtttcactattagattggattggaattgggggaagaaaagagagaagaaatgtcctctctatccatcagaggaagtatctcctgctgatcatgacaaaagagatgtgggagaaaacactttcgaaccctcattgaacccatcttcgtggggctggaccttcacaccctgatcccttttactgcctgcaagccactgttgctcccctgcccagccctcggactatgcatatgtcacatgcataatttgcaaatggtttctcccattctgaggattctctgtgtactctgatgattatttctattgctgtgcagaagcatgttcatttgttaggtcccatttatttattttcatttgcttcctgtcattttcctgagccaggaatgaaattaaaaattcctttctttagattttagcagacaacagtgatttatttatttatttagaaacagagtttcactcttgttgcccaggctgaagtacaatggcacgatctcggctcactgcaacctccgcctcctgggttcaagtgattctcctgtctcagcctcccgagtagctgggattacaggcgcatgccaccacacctggctaatttttgtatttttagtagagatggtcagcctggtctcgaactcctgacctcaggtgatctgcccaccttggcctcccaaaatgctgggattacaggcatgagccaccgcacctggctgacaacagtgtttcaaaagctagtttactataaaataataaaataaaaatgaaagcagagaaacagacacatttacagagtacagatttcttaccctgtgataactaaagtcaacccatattttcctgactctagcttctgaacttgaatgcacccccacagccaacccctttgccacctccattttctctatcaccattcgcccttcttccccaagaaagaaacttacctgttttcagttatatggctagagatcattccatgactgaaataacttctgaatggctaaaaagaagccaacattgtatatattaagaacacaatttggtaaaacagtcataaaacccctcacatatgtatgtatgtacacacatgcttcaggagagtgcacagcgtgtgtgtgtgtgtgtgtgcgtgtgtgcatgtgcgtgtgtgtgacagagagagctacagaaagggagagatgtttgtagattattataagaacatggaaagatgtgtacggttaatagcaatatgaattttaggaataagtggcaaacaaaataataccaaaaaagaaaaaaagacaaaaacctgcaaaaaggaaaataaagaaaaaaatccttttaatgtacagtgtttactgcaagaaaattggaccaatcaccatctatggtccaagttgctaatcatgtggagatttttttaaaaaaatgtcttctacatttccaatacattaatatatacaaattctgctgtgctaatccaaggaatttcgaaatatactgatggaagtttcctgggaaatcaatgaaataagtctcagcttttggatgcatagtgtgaggctaaacactaatcaaaacttaacatgcatgctctcatgtccaaagaatccaaaaattcaaatggtaattttaatcccgctaaataatatttactgttttttttctgattaatatatgttcattgtagaagacaataaaaaccacctataatgtctaaaaactatcaacattttggtaaattttcttcaaatcttttctctatggtacatcatagataatatatgattgcactaaactttattaaatagtcttctgttcatggaaatttatattgttattaattcttcaatataatggaaaaaatacacacacatacacacacacacacacacacacacacacacacacacacacacacacacacctcatgtagtgaacttaataaatttaatctgcagctctgatgatttccttaaggcagatctggaaatgaaatcatagaataaaaaggcagaactatgttgccaaattgttttttaagttctatccatgtacatgtctacctacaatatgagtgtgcttgtctcatggtctcctcataagcactgcctatgaaatggtttcaatatatctgccaagttgaaaaatgaaaaatgggacctcattgtttgttgtcttcttttataccccttggcatttttaatgaagtagaatattttagacatgttcagtggctatttggatttcccttcattagttaacagtttatttacattctccggatatttatcaattggagtgtttatttatttatttattgaggcagagttttgctcttgttgcccaggctggagtgcagtggcatgatttcagcttactgcaactttcgcctcccaggttcaagcaattctcctgccttagcctcccaagtagctgggattacaggtgtgcatcaccacagccggctaattttgcgtttttagtagagacagggtttcactatgttagtcagactggtcttgaactcctgacctcaagtgatccaccccgcctggctcaattggagttctgatgtttgtcttactgatgtgtaaaaactatagattaacattatacttaaaatttatcgtgggcttaccatgtgactgtgataggcacttatcatctcaagcaatcctaataacaacctatgagcttcattctatcatttcctctctagagatgagttgacaaagatacaaaagttaatttacttgtccaaggtcacagagctagtgaactgtatagctgggattctaacttggtaatgatttgagggaaaaaataaaagtagatccatatctcacaacatattcccacgaattacatttggattagggatctaaatgtaaaaattcaagccatacaagtgctagagggtaactttcaattacagcctttccctatataatgactcaaaatccagaggcaatgaaagaaaaggcagatcaatttacataaaaacaaaaatgtttgcatggcaagaaaaaaacccattataaacaaaccaactgacaaatatggaaaaagtatttggagtatatactagagacaaaatgctaatagcccaattatataacaaactcttaaaaaccagggcacacgggaggcggaggttgcagtgagccgagatcgcgccactgcactccagcctggcgacagagcgacactccatcccaaaaaaaaagccaggggacaaaaaaccctcctaaaacctatgctctatagttcagttaataactgtactaatattaaaatggaaaaacaatatgtaaacaaaatataaaatggtcatcaaacatatgagggaatgttcaaacttactaatacagaaatgtaaattaaaacaataccgatatactatttttcatctgtgagactgaaaatttttaaagtatgacaatacattctattggtgaagttgtgcagcaacaggcattcatatagtgctggtgggaatgcaaactggtacaacccttctgaaggggactttggcaataactaacaacatgacatatgcactcaccttttgacccagcaatcccatcactaggtacgtatatatacctccaacaataggaacatacataagcgctgagttatttactatgactctgtttgtaatggcaaaatattagaaacaacctcattatgtgcacatacaagaggggctgaataaattaagacaaatccacaaaatggagtactatgaattgtaacaaagatcccaatgaactgacttgaatatgtttactttgttaagaaaacaaagaaaaaaaaaaggactgcgagagagttccaggatatactgttaagtggaaatgactatatgctacccttcaatgttagaaaggtgagaatatgagaaaatgcacatgtatttgctcatttgtgcaaatgaaatagaaaaggtaaatgagaaactcaagaggtttgttacctactgtcaatggagtggggaaaatgggtggaaagaagaaggcaataagaaaagagtaacaggaaacgacagtgacacttctgagtataccttgtggaatctctttcactcttagaatcatagtaatagaagaagaaaaaagaactccccaaactgaaaaggatagaccactggaacaacttcaagtggtctaatgtagaagcaaatggagtccctcaaggaaagaagagaggtttggaaaagaaaaaacatttgaagagttaacagcgaaacactttccaaacttaaaggaaactataaatctacagacctaggaagctcaacaaaatccaagcacaagaaacatgaagaaaactacagcaagacataccataatcaaactactcaaaatcagtaataaagagaaaatcttaaaagctgccagagggggaaaaaaaaaggcctgcttatattcagagattagaataaaagactatgctatgtacaaagattaggatgaaggacttctcatcagaaataatgcaagcaagaagacactgaagcaagatctttcaagtatcaaaaggtaaaaattgtcaatctagaatctagacatggcaaaaatatatttcaaaaatgaaggcgaaataaagattttttttccagacactcaaaagctgcaagaatttatcatcagaagattaataccacaaaaaaatattaaagaccaaccttcaaggagaaggatgccaaggggaagtctgggtctacacaaaggaatgaagagcaccagagagagcaacaacatgggcaaatatattacacttgaccttagccaaaaggctgagaagcgatacactggcaaatatataagactttttccctattatttaaatctttaagaaaggtaattgattgtttaaggaaacataagagcattgtattgtggagtttataaaatatgtaaaggtagccggatgcgatggctcacgcctgtaatctcagcactttggggggctgaggcgggcgattgagatcaggagttcgagaccagcctggtcaacatggtaaaacccatctctactaaaaatacaaaaattagctgggcatggtggtgtgtgccagtaatcccagctacttgggaggctgaggcaggagaattgcttgaaccctggaggaagaggttgcagtgcaccgagatcatgccactgcactccagcctgggcgacagagtgagactccatttcaaaggtaaaatgcgtaacaacaaagatcaattccagctccataccatcagcaggagggcttgctctgagccacaggggagcacagcagagttgagggctgcagtgagtgcccaagaaggctagaatgctagcttagaaggattccttggatccttcctgctgattagtttttgaggctgtcctgtgtcttggttgtcaatctagatacttcaggtttactcatgagcctggtaactgctgactagcgtcatctgcttggaaagacatcttggcattcattatctggaggttatactgacaaaggtgtgctactcacatgtggataattattcctacgtctattaactggtgcccagtagaattcctggcaccaccacactgcaaagcaaaaatccttctaatggagaagctggcacaaaataaaagacaactttttataaagggttggcatgggggggaactactttatggtatacaacacagcttaaagaaatgacaaattagaattgatagtgttgtattttgaaaaaaatttaataaaaaattaaaacaataaataaattaaccattttattcttcctctttgacccttcccttacatacctcacccgcctgagattctgaaagttctagcaggaaaggaatttctgtgtcaaaattagcgaagaagctagtccactgatgttcaaaagccaccaaatcctgggaaaaaaaggaaaaagataacgtgtttggtcatataaaggaggtattttagaaaacgagaattatgaaactgtaacttatctcaaaacaccagaccatttatatatgttattttacaaggtagtagcaaactactagtacatgctactcctatggatgaatctcaaaaacattataccaaatgaaaaagctggatgtagaaaaccacctgatatgtggtccagtcatatgaaatatccagaaaaagcaaatctgtagaggcaaaaagtagactagtggttgcctggggttgggatggagactgactgcaagtgggcacaagggaactttctgggcgatgaaaatgttctctgtaaattcactaaaaatcgttgagttgtacacttaaaatggatgaatattatggtacataaattatactccaaataaagccatttaaaaggatagctaggagcagtggttcacatctgtaactccggaactttgggaggcccaggtgggagaatcacatgagccccaggacttccagaccagcttgggcaacatgatgagacctcgtctctaccaaaaaaaaaaacaaaaaaaaaaaaaacaccatgaaaaaaacgagctgagcttggtggtgcgcacctgttgtcccagctactcaggaggctgaggcgggaggattgcttgagcccaagaggtccaagttggagtgaactgggattgtgctgctacactacagcctgggtgacagaacgagactctgtctgaaaaatgaatgaatggacagtaatgatccttaagcaccttattttagcaaccctgttgggaggaatttatttacagggcacctaaaggatggtaccatgtccagtgccaaaagggtcacatctgagcagctttgttgaaggactggttgactttagttaaagggaagggtggcacagagccctctccttccttatgccctctttctagtagccacatgagcactgagaaactgcacccttcttagctgactctcctctacatacagcctccattccccatcccagctgctttttagcatcctttctgaactcattcttattctcaagcactacaaattgctttttgctatgggcttttcttgaaggttatcatcaattaacaaaaaaaccccaccaattaggacttgcttaagatactcctcaagtattatccttgtccttattttgaagttgctaataatttgtactcaaattggacagtcatcttccctgtccattttacaccatggaagggtatgtatgttagtcgcccagtctagtgccttgctcatagcaggcattctgtttgctgcaccaaaactcactggccagatctacgccctcctcctctcaaggatacacaagtactcagacctctgtgctagccaagtactgactctacttctggccctagacataaagcacaaggcaacactgctgggaagacaatgtaaacattgtctacttgctgcccagactatcagacacacagacacacagacacacagacacacagacacacacacacacacacacacacacacacacacaaattctggccaggtatggtggctcatgcctgcaatcccagcactttgggaggctgagggggaggatcatttgggcccaggagttcgagatcagcctgggcaacatagtgacaccccatctctaccaaaaaaattccttttagtcatcatgtaggtgacagtgctgatagtgttttctgagtatgttttatatataacgtaggataaaacaaaaaaaaatgtgtgtgtgtatacaggtatcttatctatctatctatatatacatacatacacatattaggaggagggagacagagagagagaaagagacagaaaatatttcctagctctatctactgaagagatttagaaacaatggccaaaccagcagcaatgagtacttctagcactcagattgtggtgctgaaataccacttctcattcaaagaaaccagaacattttagagaactgactgagagtgggtctcagacaggaaatgtaaagataaggctgggatatcttaacatagtagctggcaaggaagttatcaaggactattagtattctgttaaaataagattctgttaaattgtgaaacaacttgaagggagttcattatccaaagatagaaaaatttgagcgtcactgaagatggtagtaattacaatggatataaacacatcaaatatgtttaaatctatgagttcaaaatacaatatacatatatacaatatatttatgtatatatatacaattggagtaacaccattgtgcaatggtgaattgaggatctaattaatgaattaaggatctagggattacacatccattgctgttcacaaaacaaaaagagaaccaattagacattatgtgcttcttgataaagaatataacaccctgtaggaagtagtcttttctccaaaaatcaaccctgaaactgattaaacctctagattcaattaccaatgatcaggataaacaggagacaggggaaaatgttaaactacatcatgggaatacaattaagaaaatttcaactggggcaggtgcagtggctcatgcctgtaatcccagcactctgggaggctaaggcaggccttagcaccttactaagaccagcctggccaaagtggagaaaccccgtctctactaaaaatacaaaaattagccagccatagtggcatgcacctgtaatcccagctactggagaggctgaggcaggagaatcacttgaacctaggaggtggaggctggagtgagccaagatcatgccactgcactccagcctggacaacaagagtgagactccatctcaaaaaaaaaaaaaaatttcaactgatggcaactataagacaaatgatctggtttcttcaacagacagctagggggcagggggacaaagagatagagaaaacctacagattaaaagaaaccgaaaacacacacatgcatacagggcaggcaaacaaaactaacctatgtttataaaatcacatttggatgataaaattgcaaagaaaagtaaggagatgactaccatagaattcacgatagtgttattcttgtgggaagaggaaggaggtaatggaggttctgttgctttgctttacaataagttattagattgtacatcagttttatgctattttctgagtttgtgttattttatttatttatttatttatttatttattttgagacaaagtcttgctctgtcacccaggcgtgatctcagtggcatgatctcagctaaattttttgtatttttagtagatatggggttccaccatgttggccaggctggtctcaaactcctgacctcaagtgatctgtccgccttggcctcccaaagtgctgggattacaggtgtgagccactacacctggccatctatgttattttaataatgaaaagtctttaaaagcaaatgcataagtattatttgttcattacagaaaacagaataagaatcactgtaaacactttgggaaatgttctctcaacttatttttacatagtattttgtatatagaaatgcgcatgtacttgtaactggtaatctgcagggtcctgggttagaatgctttgccataccacctctgtgcctcggcccgataaaccaatccttttgggtctgggtttctgactccctgctatcaggtccaatcagtgcccctgtatcctgggcccagggcaatctttccactttggcactgggttatccccttctggactctggagataaatacacttctagcgctgccaactaacactttaaccacagaccttcaatgtctgtctgacctctctggtcccagatctactctccttttccagttggctgtcattcacattccagcagttaaagaacgtttcaattcagaaaaacctgtgcttgaatctctgcgtcttactggctgtgtgaccctgggcaagcaacttaacctgagcttcaaatgccttatatagctgggatgactactatctaccttgcagagatattacaggaattaagtgaaataacctgtatcaagtgcttattatcagaccttgcacactaggtatcttcagtactgcctctactgcaggtcggcccaaggctggctgtgagaaagatggtaattgcaatggatatcaacacatcaaatatgtttaaatctatgagttcaaaatatttatatatatatatatatgcataaatatatatttacatgttatatatatatgtaaattccatatgaaataattctatatgaaatgttattttatgtatattatccttttaaatcttcctgacatctttgttacttctctatgcccactttacagaagagactgaggcaccaagcaataaagtgacatatcctcaatatgtaaatatatgtatatataacacattatatataacatgtatacagatgttatataatatatacagatatatataacatatatataacatatgtgtatatatatgtaaataaatatatacatctgagccctccccacaacatcctgacatttgtctgctctctctctctgatactcataatgcacatcactggcctcagggaagctgtgcccaaagccacccatctcagagtgcatctttgccttgcttacttggctctgtccaacctcttcagctttaccagaatgcttcactttgtgagactttaaaaaaacaaaaagggaccgggtgcggtggctcatccactttgggagtgggcagatcacctgagcccaggagtttgagaccagcccgggcaacacagcaaggccctgtctctatttaaaaaacacaaaaattagccaggtgtggtggcaagtgcttgcagtcccagcctctagggaagctgaggtgggagaaccacttgagactgggaggcagaggttgcagtgagccgagatagcaccactgcactccagcctgggtaatagagtgagaccctgtccccccgcaccacccccccccccgcaaaaaaaaaggctattaatacagaacacactgtgtttcaattctattagaaacagactcaggaggtatatttccacttaaatggcctgcctggtgacacccattttggtttgggtctatgacaggaagcagtcacacagtcaagcaataccaattctctgctaacttgtaggtgaaaaacgcagtgtgctttaggggttacagagaagaagataggcactttgttacccaaaaaaccacccctgagggaggtggatatgtcagtactaattatagaataaggtagaatgaatcattaagtgctgcttttagctccatgcacattctatttttccaatgcaagatgcaatgactcttattaaaaatcaccagcattctatatgaaatgttattttatgtatattgtccttttaaatctttctgacatctttgttacttctctatgcccactttacagaagagactgaggcaccaggcaataaagtgacttgcctgaggattcaagactaacaagcagcaaaagcagaaaaatatctagacaaaagatacctagaacctgtgtgctttccgctagacatgctattctcccaacttttccccaacataaacactgcatttgtggaaatggatactgttgtaagtaagtggaactggtcaggtggatggaaagtttatcattcagattcttcaaggccaaatccagaagaaagatgcaacagaggtcaagaaccatgccactgtgccttggcccttagccagaggacaaagatactgaacttcaaacagaactcctggctctaggctggcatccagcagaggcagctcttgggtggctccaagtccatattcattgtaccatcctcaagttaggcaaggaccggcttaaataccagtgagggcaaagcagccacatttgagcaccttctctcaaaattcagcagaggactattctggcactttcagaaagcctccttctctctctgtctagaatgttctaccaccttctcccctttctggaaaatctctgattaccacacatgactcctctaagaagcaatcctgagcacttccaggcagagttgtcaccttactttattatttccaaatacagttgaatctggctctcagcctttactcttcaggatggatgagaagtccactatcacacatcaaaagggcttccttctccttcccatcacctaagaatcaagctcatagaagtcagaaaactaggaaagagcatgttctacagcccatggtgatcaccactgttgctgcttcagctgcatgatgtcgctgctgttccaggtgcaattaaagatgctctcccgagtggaccctctccactgactctagggacactagcaatgttcttaaaactacagtgctattctggcctctatgtgtgacctgcagtatcctcagttgaggagactgcatgcagatactactaaattacctgtctctcttctttatctgtggttaaatggtcttcctaattcttacattctctgtatatttgtgcattttcactttttttcataattaggttcgccaggggatgatgatgttttttcaaaaaccaaaaatttctgatgttatttttcttttacattcttctttaattataaatgtttaaacagaggttgggtttggtggctaatgcctggaatcccagtactttgggaggccgaggcaggcagatcacctgaggtcaggagtttgagaccagcctggtcaacatggtaaaaccccgtctctactaaaaatacaaaaattagccaggcatggtggcacacacctgtagtcccggctactcaggaggctgaggtatgagatcacttgaacccaggaggtggaggctgcagtgagctgagattgtgccactgcactccagcctgggtgacagtgagactgtgtttcaaaaaaaaaaaaagaaatttttaaatagaacagatgttcaatgttatcaaatgcctttttttagcatctatagagtcattacaaaagcctccaagaggaaaaattcatatagcaattacactagtagatttccagatattgaactaaatatagaacctttaataaaccctacttcatagaatattattttaatatgacactaggttctgtttgctaatatttaacttaaaatactggtatcaatattcataatactggtctgtagttttcattttctttagtttctttttattgagttttgataacagctaatttctcttttttttttcagatccagtgccgtctgaatttttgttttaagctaatttcattaaaagtttgcaagatgttctttttcaatgctgtctggttttagttcatcactacattaaaacgttttaagggtaggatctgaacttttatttatttttttagacagagtatcgctctgttgcccaggctggaggtgtgatcttggctcactgcaacttccatctctcgggttcaagtgattctcctgcctcagcctcccaagtagctgggattacaggcatgtgccacaatgctcagctaatttttgtatttttagtagagatgagggttcaccatgttggccaggctggtcttgaactcctgacctcaggtgatccacctgcctcggcctcccaaagtgctgggattacaggcgtgagctgctaatccagcccaaattcagagcctggtttagagcccggccagatctgaacttttaaatagctctgaaactatatttgaaggttttaggagaattacgaaatgtgttcctggtaatttctctgccttttttcaattggttattttagattttctatctatcctggggcctattttaattaacctttaaccaaatgtgtttgcattgaaatgatgcaattactttcttatgactcttaacttccttgtacctatcattgccctcttttctcttttgaaatttctgctttttcccttttttttcttgttagattagtttattagtgaggttattgcttacaggtctgcaggctggctatggctcagctggactgttacagtctgttctatgtatgtcatttcaggacccacacataaagcagcaactacctgagaaaagttctcacagcaagagtataagaggccaagaaaaattacacaagaacaccgaaggcctctggtcagacatgtcatgttatgaccaatcaccttccatatgaccagggccaacatcagtgtaacaggaaagaataaccactgtcaactataacaagggcatgaagggaaaaaaaaaggtatgaaaaaataatataacctaccacaattaagctaatggtttctctatttcattattttcaggtccaaagtaccagtgctgggattatttataaattcctatgttctatttcattattttctgctttccatgcagtgaattctttccttactcttttccccttcttcacttggctacttattttcaattaaaaatttcttacaagcactcctttagctgtttttcaaatactctgatatgtagtgttttcattacttaaattattagtgaggccaggtgtggtggctcaggcctgtaatcccagcactttgggaggccgaggtgggcggaccacttaaggtcaggaattcaagaccagcctggccaacatggcaaaaccccatctccagtaaaaatacaaaattagccaggcgtggtggcacgcgcctgtaatcccagctacttgggaggcggaggcaggagaatcacttgaacctgtgggggtggaagttgcagtgagccaagatcgcaccactacactccagcctgggcgacagagtgagactctgtctcaaaaaaataaataaataaataaatattaccgagtgctagtgtttaccttgttaactaatgtaaaaactttaatgctcaattttcttaatctctgaccatgttcagtaataaaattagtatacttctttttcctaatccctccttcctcacccatccagctttatcttttactgttcatttcattttgtattgttatttatatctttattacttaatttttcaggttttttctttttttagacagaatctcgctgttgttgcccgggctggagtgtggagcgcaatggtacaatctcggctcattgcaacctctgcctcccgggttccagcaatttaagaccactctgggcaacacagcaagacctgatctctacaaaaaaaataaaaaattagccaggtgtggtgatgcacgcctgtagtcccagctactcaggaggctgaggtgcaagaatcacttgagctcaggagttcaaggctgtagtgagctatgatcaccgctgcactccagcttgggaacagagcaagaccctgtctctaaaaatatatatatttttaaaataaataaataaaataaaatttgggtgttatatttttgttcttgaggattttattataggtatgttgcttcatttttttttctgctatggagaaactcaaggccaccctgcatttttctactttatctgtacctggatgccaacgcattttattgttttctggggggatttagggcttgaggggaagtctattaactttattagaatatgtctcagtgttgaccattgtgggacaattttctctggggcatggtatacccttttctttttttttagatggagtcttgctctgtcacccaggctgaagtgtaggggcatgatctcagctcattgtaacctccacctcctggattcaagcgattctcctgcctcagccttctgagtagctgggattacaggcgcgtgccattgtgcctggctaatttttgtatttttagtagaaatggggtttcaccatgttggccaggctggtcttgtactcctgacctcaggtgatccacctgcctcagcctcctcacacctgctgggataacaggcgtgagccactgtgcccagtctgcccttttgaatacgtagattcaaaccttccgttctttcaaggaaagacaatttttgaaactgtatcttttccttattattcttttactttattttctcagcatgcccactcaaagggcctaaaaccaatgtccccacagaagcaagaaacatacctaatgcccagatcttggttgttaaatattgttcctcactaattgtactgaagctctttggtgaaatggctaattctaagtctgtgaccatgcatatctatctatggccactgagagacaccactgacctgcctaaccagagtacagagtcctaaagctttagttctgtttgttgccgctcgttgcaaatttccccccgatcctgatatagacaggccgtgtatttttgtaaatagtttcctgggagcacagacatacccatttgtttaaacactgtctagagctgttttcatgctactatggcattgttaagtagttgccactgagaccataaggcacacaaaggctaaaatatcactaactagactttcacagaaaaagtttgccccccgggctctaatccttgattcctttaagccataatctcatctttctatcttttcatgccagagaaagccttctgcattgtttttctaaagtccagtccaacagaaagaatgcctttagataaaaacctaaacctaaaggccaggcaggaggccctggttttgcctccagtgaagtcacctcagagtggaagagggagcagtgtcactttgccaggttcctttatacccccaaggaattcaagacaataatcaaggaagaaactgctctattttttgaccgaagcaaactaaaatatcctttgcatttcttcaaattaaagatcactagcaggtaactgagctggacgtaatactaatatttaaaagttactgtttggctccttacatctgaaagcaaactctccagagacataggatccatcttgctgtagacattccatagattcaaactcacatcctgcaactgcaacagagggcaaaaacattgaaataattaagtcaatatcattaggacaatcagaattattttctgatgttcagaaatgactcttttggtataaactagtgtgaacagaataataaatcaaaaatttatcaattatatttgccctatacatattaataaatgttttaccatacaaggaaactattttttcagaaactttggtactgattatcttcaataatgggcacatatatatttatacatacacacatgcacatacagacttgtgtatattgtatattttttgcctttgttttaaataaaattttaatcaaaataatccatgtccatggctttaaaaatcaaatggtacagaaggcttataataaaaaatggtaatccccaactccaacctttcccaaacccccactagtctcactcctcataaacaaacacttaggtgctcccttcagcagcacatatactaaaattggaaggatacagagaagattaccatggcccctgtgcaaggatgacatgcaaatttgtgaagcattccgcattttcaaaaaataatttttttaaaaaagaagcaaccacttagaactcacttcattttatttttggtatttacctccagttttgatacaatatgcttctatcactattttttgatttatcaatttagaaactaaatattgacttctggcaaagatgtagttcttctacacccattcctattcacaaactgtttctttctcaaactctcggactcaagtaatccaccaacctcaacctcccaaactgctgggattacaagtgtgagccactgtgcctggcccccaaactgtttacacatacatatcctaacatcatttaatatcataatatgacttttttagtttattaataataactttttttacacaatgaattgcttttattttggtatgcatccaaatttcagcatttagtggtcctgaacagaaagtggaaagacgcagcaatttgccaggaggtcaagccaaccaatttcggggatctgctgtgcacaccgggttctttcttaatccctgctgaggatcttgagaagcagcagcagcaccaaaaccaaggcatgcaccggattcaaggttctttttgttccagttttcagattccaaactagaccccaatggattgcaaggatgaccatgaaagccctgtttaaaacttcaatttttaaaagcaaaagccattacatgaaagtaaaacaattcagaaggatcacgtgtgcttccaagtgtcttcatgtggcctttctccgagtttaaccaccaaggactctgagagctggcaggtctgagtaaccctggtgactattcttttcaccttatcaaaacctgagctaaaaacaacgcatcagccaatgacagcagagggtggcagggctgaggacccaatattcatttcccaggctggtggagagtgaataagtatggttacaaaattaaacaagggaggtcaaagactctttccaaccttacctgatgtcttctggccaaagcaaggaagtctcatggaaggtgttgggtggtgatggtgcaaaaaggatcttgaggagggaataaaaagcagcacccctcgataaaggtgggggagagaagatatggggaaagctctgaattcctcaccaaaggccaatctcagaggtgagtggaagggttacaatctatgctttggccaaaggtgggagtggaggagtgtggggacaggatgatggcttggaaggggcatcatttaagacttaaaccaggggtgcaggcaaagcaccccacacacccagcagtagtcccacaggctgcgacctgaagccttcacatctactctaacaagccccccaggctagacggctgttgttgcagggaaagtgggaggtgggagggtaaggggagaaggcagagaccccaggccgtgtaatcagcagcaaaatgactgtgtgatgtgtcttttcacagttgagttagatgtgccccaccagttatgatggtaatcaatttaaacagactttcttgatcccagaagttcaactacatggacagtggctacacttgacaggatgatttgttatagcacaacttatatatttcaaatggacaaaaaattagtatcatttacagtatcttaacttcctttgaatgggagcttcctttccagtactctgaggtctacaagacatatctagaaaatttactactgaaaaatgaagactgcttaaatcgaatgttggggggaaggggaagggcctgtggtttttctttttggttaattgctctaacactgtccttcaggtggctgagggagtttcatattttctttagacatcattaggcgccgaaactcttgcaggacaactttgatgctatatgaattctgccattttgctagcactggtatggctcttgggtccaccactccattagaactattaactccattcatattaattttttgttacaaatattacaaaggggggtgcttctgagtatttaggtccatattctattttaaggctgtatattcggttttcataaattgttcctggaggcccaattatcatccctgtccatcttgtaagtgtcatgtcttcgtaatcttctagaccccagctaactgtgtcatctcctactcctttctggctttcttcgagttcttccaacagttggaaattgcaagggacttttactactgagcctgtggtggctgccatcttgcactgctgtcgcttgaagcggtttattaataattattgtttacaatgttaaaaccatgtaaatattatttactgcaggctaagtacattttacattccaatttgctttcttattattattcttagaagtactaacagcttcatttttttcacctgtataattttttttttacaaatcaattctgttttttttctaccagccccatccaatttgcctactccagggtgtctcaacagtaacactattttcattttgggcttgacatttctttgttctgtggggttgccctgtgcattgtaggccctcattagctgcctatagcacccgcccccgctgctccaaatgcaaaccaaaaatatttccaaacattgtcaaatgtctagggggaaggagaagacaaattcaccccgactgagaaccactgacttaaacatatcagaaattcaaattccctttcttcttctacctcattctggctggactttcacattctttgacatcatcctggagctctcagttgatggattttgctctgcgggttacttgtctcctctttcttggttaactacccttgtttgatggaacacattatccaacagctaagaaaggattaatgcaggccaggcacagtggctcacgcttgtaatcccagcaatttgggaggccgaggcgggcagatcacctcaggtcaggagttcaagaccagcctggccaacatggtgaaagcccgtctctactaataatacaaaaactagccaggtgtggtggcacacacctgtaatcccagctactcgggaggctgaggcaggagaatcacttggacccaggaggcggaggttacggtgagccaagatcgtgccattgctctctggcctgggtgacagagtgagactccgtctcaaaaaaaaaaaaaaaggaaatgattaatgcaaagcaaacttttttgttttgttttgttttgtttttagttttaaaatgtctttattctggccaggcgtggtggctcacacctgtaatcccagctacttaggaggctgaggcaggataatcacttgaacccaggaggcagaggttgcggtgagccgagaccatgccattgctctccagcctgggtgacagagtgagactccgtctcaaaaaaaataaaaactaaaaaataaaaacgaaaaaaaagaaaaaaaaagattaatgcaaagcaaactctttttttttttttttttagttttaaaatgtctttattctggccgggcatggtggctcacatctgtaatcccagctcttagggaagcagaagcaggaggacagtatgagcccaggagttcaagacctgcctgggcaatatagagagaccctgttctccacaaaaaggaaaacaaaacaaaacaaaaagacataaaatgtctttattctgtcctcatgactatgactttggattctttattttctctgcacttcatcttggatagtttctactgctatggcttcaaattcactcatcttttctttagcattattcaatctgccattaatctcatctagtatatttttcctcttaaaaaattctcaattattgcattcattattatccagtgtatttctcatcttagatattgtagttttcatctctagaagttgatttgggttttttttgtttttgagacaggggtcttgctatgttccccaggctggccttgaactcttgggtgcaagtgatcctcctgcctcagcctcctgaatagctgagactacaggcacatggcactgcgcccagctttgggtcctttttttgtatcttctatggctcagtctttcctctagcttcttgaacatatgaaatgcagttgtaacaactgttttaatgtccttttcttctaacatttctgtcaattctaggccaattttgaagactgattacctcattatcaattgtgttttcctgctttttttaagcctgatgatctctggatgccagacaccatgaattttaccttgctgggtgctaaatatttttgtattcctataaatattcttatgctttgttctggaaagcagttaagtaacttgaaaacagtttgatcctttggggtcctgcttttatgaattattaggaaggcctggagccactgctcagtctagggttgatttttccctgctactgagacaaaatcctcctgagtgatctacccagggcccagtgaattacaggcattcctcagagctattgcaggcttggttccaaatcactataataaagtgaataatgcaataaagcaagtcacacaaatattttggtttcctagtacatataaaagttatgtttacaacacaccatagtctattaagtatgcaataacacatctaaaaaaatcaaatgtacacaccttaattttaaaaatactttatcactaaaaaatgcgaacaatcaactgagccttcagtgagtcacaatctttttgctggtggagggtcttgcctccatgctgatacctgctgactgatcagggtgttggctgctgaaggttaagaggctgcggcaatccctttccctcccttcccctccccttcctttcctttccttcttttctctctctccctctctctccttcttttccttttttcttttttttttttttgaaatagagcctccttctgtcacccaggctggagtgcggtggcacaatcatagctcactgcagccttgaccttctggagcaatcctccagaaagactgcttccttctcaagcaatcctcctgcctcagcctccagagtagctagaactataggtgcaccatgatgccagctaattaaaacaaaaatctgtttttgtaaagatgggataatgttatgttgctcagactgatcttgaactcctagtctcaagtgatcctcttgcctcagtctcccaaagtgctaggattacaggcacaatccactatgccagcagccatttcttaaaataagacaacaatgaagtttgtcacatcagctgactcttcctttcacaaaagacttctctgtgatatgccacactatttgataacattttatttatttatttatttatttatttatttatttttaggaggagtctcgctctgttgcccaggctggggagcagtggcgtgatctcagctcactgcaacctctgcctcccgggttcaagcgattctcttgcctcagcctcctgagtagctgggattacaggggcataccaccatgcccagctaatttttgtatttttagtagagacagggtttcaccatattggtcaggctggtcttgaacttctgacctcaggtgatccgcccaccttggcctcccaaagtgctgggattacaggcatgagccaccgtgcctggccgtgatagcattttacccacagtagaacttttttcaaaattagagtcaattctctcaaaccatgccactgctttattaactaagtttgcagaatattctaagttctttgttgaagtttcaacaatgttcacagcatcttcaccaggagtagattccatctcaagaaaccactttctttactcatccataagaagcaactccccatccattgaagtttttaacataagattgcagcaagtcagtcacatcttcaggctccacttctaattctagttgtcttgctatttctaccaaatctgcagtgactccctccactgaagtcttgaatccctcaaagtcattcatgagagctggaatccacttctcgcaaactcctgttaatgttgttattctgacatcctcctatgaatcatgaatgcccttaatgtcatctagattggtgaatctttttgagaaggctttcaatttttttttgcccagatccatcagaggaatctattgcctaacaaaatgtatttcttaaataataagccttgaaagtcgaaatgacttgatccatgggctgcagaatggatgttgtgttagtaggcatgaaaacaacattaatcctcttgtatacctccattagagctctttgctgtctagctgccctgtcaatcagcagtaatacttgaaaggaattttttttttctgagaagtaggactcaatagtgggcttaaaatattcagtaagccatgctgtaaacagatgtgctatcatccagcctttggtgatccatttaaagagcacagagtagatttggcataatccctaagggccctaggatttccagaatggtaaatgagcactggcttcaacttaaagtcaccagctgcactggcccctaacaagagagtcaggctgtcctttgaaactaggcactgacttctctctatttatgaaagtcctagaggctgggcgctgtggctcacacatgtaatcccaggactttgggaggccgaggtgggaggatcacttgagcccaggagttcaagaccagtcctggcaacacggtgagaccccatttctacaaaaaataaaaaagttagctgggcatggtggtgtacccctgtagtcccagctaggtgggaggctgaggtgggaggatggcttgagtttgggaggtcaaggctacactgagccgtgatcacaccactgcactccagcctgggcaacacggtgagactctgcctcaaaaattaaaaaaaaaaaaaattaaaaaaataaaaataaaaaagaaagtcctagatggcatcgtcttcttatacaaggctgttgtcagcactgaaaatctgttgtttagcgtagctaccttcatcaactatctgaggcagatcttctgaataacttgctgcagcttctacatcagcacttactgcttcatcttgcacttttatgttttagagacagcttctttccttaaacctcataaatcaacctctgctagctttaaacttttcttctgcagcttcctcaccattctcagccttcacattaaagagagttagggctttgctctggattaggctttggtttaacggaatgttttggttggttgatcttttatccagaccactcaaagtttctccgtatcagcaatacggttgtttcactttcttataatttgtgttcagtgaagtagtgcttttagtttccttcaagaacttttcctttgcattcacaacttagctgtttggtgcaagaggtctagctttcagcctgtcttggctttcaacatgcctccttcaccaagcttaaccatttccagcttttgatttaaaatgagagaattgtgactcttcctttcacttgaacctttattggccattgtagggttattaattggcctaatttcaatattgttatggtcaatgaatagggaagtcaggataaagcaaaaaacgagggaacagccagtcagtgaagcagtcagaacacacacatcatttaagttcatcatctcatatgagtgcagtttgtgatgccccaaaacaattctgatggtaacatcagagatcactcatcatggattatcataacagatataataaaaatgaaaaagcttgaaatattatgagaattaccaaaatgcgacacagagacacaaagtgaacacgtgctgttggaaaattggagccaacaggcttgctggatgcaggctgccacaaaccatcaatttgtttaaaaaaaaaaaaaagcaatatctacaaagtgcagcaaaccaaagcacaataaattaagataggcctgtatgtgttttgccagtctaactggtgaaaacaggcactgttctcagcccagaacacacatcaggcactatcctcgaatcctttcagataggtttctcttgaccttgagtagttaccacacacatgactgcactgatcagtattctgctgagtaccgactggggcaaggggaatctttggacggttctttcctctttagtactctaactgctttggtccccgcagactcccagctgcatctcctaactcagggagtgcgctgggcaccacctggatcctctcttctctatgctgtgtctggaaactttctcaaagtgataagctagtaccatcaaggggctcacattgattgtttccgtctctcagggaatcaggattcctcactgcctgatgcctagtttgtgtttttgttttggggggcttttgttggtttgggaaccagtttttgttgttttgtggtgggtgacttgttttttcttcctggaagcctttttttttcttttttggccaaacttactgaccaacttcctggaagctttttttttttttttgagacagagtcttgctctttcgcccaggctggagtgcagtggcatgatctcagctcactgaaagctccgccacccaggttcacgccattctcctgcctcagcctcccgagtagctgggactacaggtgcccgccaccaagcccggctaatttttgtatttttttttttaagtagagacagggtttcaccgtgttagccaggatggtctcgatctcctgacctcgtgatccctccgcctcggcctcccaaagtgctgggattacaggcatgagccactgcgcccggccatcctggaagcttttaaagatattctttcatccaggctgggtgcaggtggctcacgcctgtaatcccagctttcagaagccgagaaggcagatcacctgaggtcaggagtttgggaccaccctggccaacaaggtgaaccccatttctctaaaaatacaaaattagccaggcatggtggagcatgcctgtaatcccagcttctcgggaggttgtggcaggagaatcgtttgcacctgggaggcagaggtcgcagtgagccaagatcgtgccattgcactccagcctgggcaaggagagtaaaactctgtctcaaaaaaaaaaaaaaggatattcttttatccttagtgtctgaaatgtcacggacagatttaagggttttttttcctcttcccattcatacttaagtgatttaatttaaaaccttttatttctctttatgattgggaatgtttatgttttaaaaagatttcttcccttatggtatcgtggcctcctctttccagaaattctactcattggatattagacttcttagatcagtcttctaacatttaaagttaacttttttttttttttcagatggagtctcgctctttcgcccaggctggagtgtagtggtgcgatctcagctcactgcaacccccacttcctgggtttaagcaattctcctgcctcagcctcccaggtagctgggactacaggcgtgtgccaccacacccggctacttttctatttttagtagagacgggggtctcgctgtgttgaccgagctggtcttgaactcctgacctcaagtgatctgcctgcctcagcctcccaaagtgctgggattacaggtgtgagccaccaagcccggcctaaagttaactttaaaggttaaagtcttttaacttttttatcaatattttctatctccgtgatgtttttattttacctttctaaggagtttcctaactttaccttccacccctctattgattttatcaattatgatttcctagagctcgtattttccatacattcagttattacaacattcacttgtcctatggttgacaaatcttacatttttctgggcatccaaaaagagttttatgtcaagttttcttctataccttaaattatctttgggtcttaatgaactggtcttcttttaaaaaaaaaaattgatctttttcttttgagttactgctgtttaatcaaatgtctggtgatctttggcttcctattcatactttgaaatgaggcaatgaaaaggctaactggaaggtgtatattcctgataactgttatgcagagcttctattactgggtctccatccccttatattctacatgccaaaatgtgaacaggtttactctcaggaagcaaaaactacactagccaatgaaatctcttggttttgtcttgcctttcagtttatttatttcatttttatttatttattttgagacagtgtctcactctgttgctcaggctggagtgcagtggttcaatcagcccactgcagcctggagctccagggctcaagctatcctccggcctcagcctcccaagtaggtgggactgtaggtacatgccactgtgcctcgctaatttttttttttttgagatggagtctcacactgtcgtccagctggagtgcagtggcatgatcttggctcactgcagcctccacctcccaggttcaagtgattctcctgcctcagcctcctgagtagctgggatgacaggtgcctgccaccatgcccagctaatttttgtatttttagtagagacggggtttcaccatgttggccaggacggtcccgatctcttgacctcatgatccacccgcctcagcctcctaaagtgctcagattacaggcttgagccaccgcgcccagccgtgcccgactaatttttttaaaatttttttgttgccaggctggtcttgaactcctggcttcacgcgatcctcccgccttggcctcccaaagtgctaggcttgattacaagtgtgagccactcaccaggcccttttcagtttttttacaaaacctccacccaaatctcttctttgtttttcctagggtggaggtggcatctgcaaatgcctggttgactgtcacttgaggggagaggagagcggtagagggaggtacagactattacataacaacctttaatttaattctttcctttcaatatcaccaatttccattctctattctccacttcatcatcttccttcccattgctttaatctacttggccccttcctctgtattctggaaaagcttttcaagtgtgtcaactgattagattttttatatctttttttaatgtaagttttcattctactaataaattttgagacttcctacaatcttttcttatatgtcttccatctccctttttaattttgattgctcacctcattgctagatctcatttctctttttataaattctgttcctaaaaagtaccaaaaagagaaattttctcaattatttttgttccttgaagaaaatctttttttttttttttttttttttttttgagactggagtctcgctctgtggcccaggctggagtgcagtggcgctatctcggctcactgcaagctccgcctcccgggttcccgccattctcctgcctcagcctcccgagtagctgggactacaggcgcctgccaccacgcccggctaattttttgtatttttagtagagacggggtttcaccgtgttacccaggatggtctcgatctgctgacctcgtgatccgcccgcctcggcctcccaaagtgctgggattacaggtgtgagccaccgcgcccggcagaaaatctttttttaaagcatgctgatctatccctgcatctaatatgttgtggtctctttcttacattttgttgacccttttcctaattcttattctatctttcaatatgaagatctatttgtccataaacagatgaatgaatgctcactggttactcattatttagaggtttgctattaggatcctccccttgtggagctgattgatgtaaatttacattaccagatcacagttccagcagtgggagagtaagaaggaggaagttagaggcagaaaacgccctagcagaggaacttccctgtactgcttcccaggaagaaaaaattatctatatcgatgactcagtttggcccagcataaatggcaagtaaaagctgtggctgggcctggttttctttctcatgctggcacctaccacatgaggaacaaaacacatctgggctaatgactttcttctgggtatggccatataatacaacacaagttttaaaaattaagttattaagtatagctctccttttcttagcctgcaaaggaggcaagagcctttctggctcaggcagtcatcaggccatcagagtggagtagagagggcactggcagagcccatctgtaggccaaactgctccacacctcaaagcactgggaagggcaggggaaagaagactgaggtggggtagaatgaaatgtgcctgaaggaaagtatctgaaaataaaagtgagcagctacagaaaagggcaggatgtggagagagggacctagagaagacctatagtaactcttcctttatgatgtgtaccatttcttcttcatggcccatcccatttcctaaaaacatcatcctaatgtaaagatctacattacttttcaaaggtgttttttggaaggagataacgttctttttgaatgtgacttcatagtgtgatgcaccttaaggtcagaaaacctctctcatttgggttatgtcaactatgtggcctcccagtgcacttcttccaatgtgattctagctgcagcccagtggttaggagcacaggctctgaaaccagaccatctggacctggccccagctctgcctctcactagctctgtgaaactgggaaattcatttaattgctcttgaacggggatgtacctcagagggttactatacctacctcagagggttactataagaatgaaatcagtcaattcacataaagtgcttagaaaagtacctggcatatagtaggcactcagacctagttcatacaattaattaaaaataaatattaccattattaattaatattataaaaatgttaagtttcttctctaacccctatggtctgcctcccttcaagcccctactcttctaagttagacagcattaattcccagtaggggaagcttccacagctttgtggatgttctgctacttgtagtcaatgtgagaatactgtgattttgcaaaaggaaaagtggagtccaagtggtatgcttcccttcagccccacagcccatgctgctccatttcagaggatgtgatagttctcccaggcaagcctccagtcatctgctagggatgccagtacttctcagaggggtagaaattagctctgtgccttgcttctaagggacccacttactctctccctaataggatgtccccatttctagcatgacaatgttccccgtccctggtttcctgtactgggcaggtcatttcagtggggatcccatggaggcacatggatactcgtggtcatgctgctaacctatcaagccattttccttaatctgtactctggaccacacactgtcccagactcacttaagaaatatttactggtcattttctagatgcaaggaatgctgaaataaaagacactgctcttaccaaaaaagctaatctttccattcctctagtacattgtacttatccaaattctgcactgtccctttcattgatcttgaatagttctcaaattatataaatttctgaggtacaaacaacaacaagttatgtttttgtacttaaggagcttccagtacaaagaccagggtggatgggttggtgggcaagtgggtgagtgtgacaaatgtgtaataacaggatcataaaagctgtaggaaaagtcaatctagggggctacaggagcagacaggaagaacagtcagctgagaatggggtaagggagaggaaggacggagaagaactccaagaagaaaggacacaggacctcagtctgggactagcctttagcagcaactattttccatttcaagtctcctaacttgctccatgcccttgtgaggtaactgccagctttttggtgttataataatgcacactcacatgggttcttcataaaaacagcccagtggcagacaaaaactaggcatactgcttttcatacatacctcatatttcatggtaaaaaatccatcccctccaatgccctcaagtgcaaaggcctgtacaattggccatttctccaccacaaacatatcaaatatctgcaagtgacctagaagaatcaaatacaacaacacatatcagataccatcctgaatataacagtctaaacctgacctaacatggttagacaggtatcatttctcacgtggtcaccagggcctcacctagcaaaataaaatacaaacagataaaatggttagatattgaaactagaaatacaaaatgaaagtcaaggaaaattcaaaccataaacaagtcacattcagatttctttacagtatattgtaacattccagtttcctgagtaaattaagtaaaaaataagagtagtctattatatctgacttgcatcattcagtgggaataattattaacagacacaaagttggctcctttcccttaagaaacacagccaatcaacttcctcaagggaaaactactaaatcaaaaatgttcctttcttgttaacaatagcttcaatgtgcaaggttttttctttttgttgttgcaatacaagcactgctaaacttgatagtttttccctgtattttacacatcatttaaaaacatgtcagcatatctttttagaagttatccaaatccctctttcttattaccaagatgccccaacatctatactatactctttgtatagtaagtgatacagccatgtcaattgtgctaaattctgtatcagttcttctacctgattttgggcagcctgctgtgttgctgcagaaacttcacagtaattaatacaagcttgcacagaaaagtccccatacttaattctgcttgatgtctttggtaaaaatagacgaaggggtttctcagctgaatgcccccaatgaaaggaaaagtagtgacgttcaattcacacaccacctaagcaaggttctagaaggcttgctgtcagatactcaccttgggagctgtaaggaatgccaattctactacagtctcgaaccatgtccacaaagctggtaattttaaattcttctgcggcttcttcatcttcatactgaagagacaaatcaaaagaaaaataagctctgatgagatatcacacaaattcccatattttctctgcattttgtcaaccagagttgtcccaaatgacatttacagaggactgcacccaaggaggtgtttccaaagccaacctttttcatttgctagtcagaaagacttgttatgcccttatttcatattatacccaaaaatcaactgaaatggatcaggaaacctaaatgcaagagataacacttttcccccaaaaaattccgccaaatactcatatgggaggaagtgttcttgaccagtatcaggtcacaactttcatgaaatcctaaatctcaaatccaaacttgatttccagtcaaacccctgaaaagggcccaaagggaaagaaaaacagataccaagacattcaaacacaggaatgtcagaaagcttaaaaaattctcccagggagccaggcatggtggctcacgcctgtaatcccagaactttgggaggctgaggtgggcggatcacctaaagtcaggagtttgagaccagtctgaccaatgtaacaaaactccgtctctactaaaaatacaaaaattagccaggtgcctgttgtcccagctactcgggaggctgagacaggagaattgcttgaacctgggaggtcgaggttgcagtgagccgagactgtgccactgcactccagcctgggcgacagagtgagactccgtcccagaaaaaaaaaaaaatcccagggcagtccctaggcactaatcccctaagagatgggattcaggatggtgatgaagaagcaggcaaaaagttaagttcataaacttaccactaggtcccaatttgaacagcctccttttgtctccacaggcatacaatttatctataaggtagcctcaaaacgaaatatgaaattctccacttcaaacagataatcttttttatatagtcacactctgcaatttgattgctgatcctatttcagatcaacactttccttaaagagtattcttagagtgtctctaggtgcctgtcttctcttttcttcttacctcattttcggtcatgcagtggaaatgcagatttctccaatgtgccacataaggtaagagatagcgaaagtttacaggattacagtacagatggacgctatccgatttaatcaatataattacatctgtaagaaaaacaaaatcaaaacacaagactgtcaaacacatttcttttagatattttctgcccacataattagtaaaaccattgaaactacttcagagacaatgtaacaaaactctaaactgaaaattatttaattaagcactgtgccttgtaaaccaaaaagtatctgagacaagtctcaatcaattttgaagtttattttgccaagtttaaggacatgcctgtgacataccctcaggaggtcctgagaacatgtacccaaaatggctggataacagcttgattttagactttttagggaaacagaagttaccagcagacatcaaccaacacatgtaaagtgtacatttggtttggtccagaaagtcggggtcaggagtgaaagggtcctttcgtgtcatataggtggattcaaagattttctgactggcaattggttgaaagagttaagttttattacctaaagatctggaatcagggctgggcacggtggctcacgcctgtaatcccagcactttgggaggctgaggcggatggatcacgaggtcaggagtttgagaccagcctgaccaacatggtgaaaccccgtctctactaaaaacaaaaacacaaaaattagccgggtgtggtggcgcgcacctgtaatcccagctactcaggaggctgaggcaggagagtcatttgaacctgggaggcagaggttgcagtgagctgagattgcaccactgcactccagactgggcgacagagtgagactccgtctcaaaaaataaaaataaaaataaatacagacctggaatcaacagaatgtctgggctaagataagcggttgtggagaccaaggttcttattatgcaagtaaagcctccaggtagcaggcttcagaaacaatagaaggtaaatgtttatcagacttaaaaaggtaccagattcttagttgatctcccctggatcaggaaaagacctggaaagtgaaagggattctctacagaatgtagatttctctgacaagagacagctttgcagcaccatttaaaaatatgtcaaaggagtatattttgggataaaatacttagatttctttcagggtctgctatctgctatgtgatgtaccttactgctatacaacagcaatttggttggtcttaagatctgttttctttctttttttttttttgacagggtttcactctgtcacccaggctggagtgcagtggcatgatataggttcactgcaacctctgtctcccaggctcaatcctcctgcctcagccccacaagaagctggggctacaggtgagcgccaccatgcctggctaatttttattttttttttgtagagacagggttttgccatgttgcccaggctggtctcgaactcctaagctcaagtgatccagtcaccttggccttgaagtgctaggattataggtgtgagccactgcacctggccaagatctctgttttaatgttaatgttggtcagttatgcctgaattccaaaaggaagaggacataatgaggcactgccaacctccacttcctatcctggcttgaactcgtttttcaagtttactttggaatgcccttggccaacaagggggtccattcaattggttggagggcttagaattttatttttggtttacagcttcaaagtgactttagaactttcaaatgttgacagcaagaatttcctagtccccaaacaatactccccctaccatggccctctgggtctggcaatgcagttgcagaacgagtcaaagaacagcctccatctactgaggcatagtgttcacatagtcacatctatgggaccagacatagctgagtacttcactgcagaggtcaataccatatggaaaccccacagcctaaggccactgaggcagggaaacagcaccaaatatggccagtgactagttgtccctcagacatcagtgtctaaagctctcagctgttggctcatctggctctaaggcaactgcaggcccaacgatactgcttgtccctttaggaagagttattgtgtgcagtggtgagctttgtacgcaggaaagactgggaggaaggaagtagaggccagtggaaagagcttctataaatagatcagcagcttacagatttaaggaatagtcttcaatgctcatgggtgaagtaaataaagcaatcccaagaatgcaaataaacctaggtaaatggaagagccatgggatggagtagaatattaaagcagtttgacaactgaggacaaaggcagtcatacttccagaagaaaaccagaggccccattctatggctcctcagaaacaagagccattaggcctcctaacaagatggaactagatgctgtcagaggtaagaaaggcacacgcataggggcagagaacacctgatgcagcaggtgtaggacaacgtcaaaagggtaatacagtgtgacagaccacacctgacaaaaacatcttataagcccaataaatactgaccacatctgaccacacagctgagtggcctcctgaaataaaactccatgggtctgaccttttaagccactctaagccccatgcctgtaaggcccagggtgttccagggaacacaggatgtagcagcctcatcactattgactctttaggtaagcacaagagtcaaagggtagcaaaaggtggaatggaggcccctctcatctctcagcatattggtccttctcacacactccctccaagagcccttccctgagtcattcgtagaccacctgcagaggaatgagagttggctattacctgaagactgagggcttctggtgtgtattatactctacagtaaaatgtaacatgcctcaaagaattaggatcccgtaagagacataacatagtagttactaaacctaaagtaagcattccccaaatctcttagaactctggtgttatcactatgaaccaaagtttaacagagtttacagtcaggtaaaagaggaaagcatatgagaatgggatgaatacgtaacctatttaaaagctgcttttaggctggtgcggtggctcatgcctataatcccaacactgtgaggccaaggcaagcggagttcaagaccagcctggccaacatggtgaaatccctttcctactaaaaatacaaaaattagccaggcatggtggcgggtgcctgtaatcccagctgctcgggaggctgaggcaggagactccaccaggaggcagaggctgcagtgagccaatatcacaccactgcactccagcctgggtgatagagcgagactctgtctcaaaataaataaataaataaaagttgcttttagaagtaaattcatgttggcctttccccctctcatatgagatcaaaatgtagaaatttggtgatctctgctttccaactacttgtataaacaaatttattaatttgtaggaaaatgctcatttcctaggcacccactgtgccaggtaaaaagataaaaacaggccaggcgtggtggctcacagctgtaatctcagcactttgggaggccaaggcgggatcacctgaggtcaggagttcgagaccagcctggccaacatggtgaaaccctgtctctactaaaaattcaaaaattagctgggcatggtggtgcatgcctgtaatcccggctactcgggaggctgaggcagaggaatctcgaacccaggaggtggaggatgcagtgagccaagatcgcacaactgcactccggcctgggcaacagagcaggactctgtttcaaaaagaaaagatgaaaacaaaaataagcaaaaaagcacacctttaagaatttaaactatttccttaatttcagtactgtaatgtccttagcaatctgggctgaggtgaaacgtgtggctggtatgagctgccaagattgcttttttctaaaccagcagatgttgtatagcgtaaggaaaaaaatattttgtaatcaaaatctgaaaccaaatttgaatggaaaaaattgtaatggaaggagtaatttcagtctactctttttgcacttcctaataaaaaggaaagctttaatcagtctataagaataaacactactaaggacttaaccagagaagaattttcatatataccagaccaggatttctcaacctcggcactactgacagtttagatcagtgaattccttgttctaggtgactgttctgtgcattgtagatgtttagcatcatctctggcctctatccactagatgccagtggcatcccctacccagttttgacaatcaaaaatgtcttcagacattgccaaatgtcccctgcaggacaaaactgcccccagttgggaactactgcactagacacatagcaatattatttcacatcagatgtttgttttcatgcctcccccagctgcctcacaagagctgtctgtctcttgtccacttttattttgtctattccagtgtctcctgacccatctggcatacaagacatgattctaaatatgtgatatcagagatagctcctgggcaatagcccccagcagcatcaacacaggcagagtgtctcagtgctacggagaggggaatataaacagaaatccagcattgtagtcacaggcatcttcatgaattaaagtcacagagaaaataattcccaaagacagcaggacaaagagcctttgttcctcagctgataagccacaagaaatcttccttgtaggagctgcctgcaggcccatccttacctcacaactgaaggtgctttcacaggacaacaccatgtaatctgaaccgttagcatgtagaggcaatggtcaatgaagaggaaaaccagtactttgccaaacagagataaagccaaacactgatgtttacttgtttctctaaagctgaattagtaaatatactctgaaaactacttgttgctactaaatatatcagcaaagaaaaaatgccgtttttttcattctttaaaaagcaaacgtttactggggctttggactattttaaattttattccataagaagaccataaaataaggatccaaataaataaacctcttactcttctatcacacagagtttaccaatatatacttaccatctagtacttcttcagaaaatcccgttttctcaaaatcactggtattctgattgtacaaaccaaatagaagataatttgccagctctctgcagccttcattgtacctgctatcgattcctgcaaggcaaaggaggctctgatcagctgtaccatactacagggagcaaatgagccaataatttgcccctgcttagcaaaaccctgatgatcaagctgaaggacgcagctcagaccagttttgtgccagaaaccaagctaaccaattctgtgaaagaaacaggtctcagcatcaagtacctttacttgaattccaacgtcttgtaattgagataatcaaacagcacagattatggagcctgttaatttctgaaaaggattcatcttggaatgctttcagttagcttaagaataggggtcagaaaaatcttcacctttcaaagagatctttaccaaaacacttgggatcaaacaaaggcagattaaggtggcttgacaagaacccaataatgtgaagaagaggacaagtgagtggaaccacaaacacccatcactttacaattatgaggctcaaggtctagcactgtactagatgctggggtatggtggtgaacatgcctgcaaatgaccctcatgaagcttacagtctagaggagctgaattagagacaaataaaaaggaaattaaacaatactgtcttcactaccatctctcaatgctttaggtatatatttattacctaggtcctgatgtctgtgaagtctcagagtatggctctgggcaagagggacatgtcatggcaggaggcagctatatatgtgaggctaaaagaagggcttaaggcagaagtagctccaaaaatgggcttcctatctcactgatagctcatctaacctcattaaaacagcaacaaatttcgggggaacaagaactaggaggacaccaactcacagcttatttcacattgctactattactaataccttcctgtgaacaaaaaaagccaagttgcccaagccctgagtcccaccttgttaaaagcactgacctaggatgcagaggatcccatccggccgagacttgctgctctgggtcaggatgctctgaacctgccgaagtcgactgcagctgcaacaagaacagaaaatggtcccctgagtgccaggacagccccatgagaagagcagcatcctgtgtcccacaatggagtcatgaggaagaggaatgactttgctggggatggaaattgattcttgtctggttctggtatcagaaccataaaatggattgggaaggttcctttctcttttattttctggaagaggttgtgcagaactggtctgaagactaagtctgacctgctgattacgaactcctcaacagaggatgaagccaaagtccctctctcatggtcaatggtggaaaggattaagactcagcagctgactccaagaacttccaatgacttttcatgttttgaagatttttcaaataagagtttccatactgatcaccccacttgtggtcctcatcagtctgtctcaaaaacaaatgcaaactaaacccccaaactggcctgagaacctaaacaaagctctaattcatcctcacagctatccatatagggagtgtcagcagagaatacttgcttccatttctgtgtagacctattattccttcagccctagggacagccgtttgctcaagcaaaatgtgaggcactctcagacattcacattacttctaaggaccccattctctccatgcccatcccctccttcccagaagctccagagagaggcgcccgatttcctgctcaagactgattcttccacctggtctcctcatcatctccaggtccaggatctgcctctaatactcattccctaacacttttttttttttttttttttgagatggagtctggctctgtggcccaggctgaagtacagtgatcttggctcactgcaacctctgcctcccaggttcaagtgattctcccgcctcagcctcccgaatagctgggattacaggtgtgtgccaccacgcccggctaatttttgtattttagcagagatggagttttgccatgttggccaggctggtctcgaactcctgacctcaggtgatccgtccgcctcatgccttacaggtgtgagccaccgcgcccagcttcctaacactcttatatttaatactttctctacagtcaatataatcccagtcctactacatcattattaactaagagcctctacaaaccaactacactaattcttccacctatgaagccaggcatcatccccatcccttactgaatctcctccagtacactgccttactctcacctcaaaactgtatttacagccaaactacactatttctcttcactaattcctgaattcttttgccccactggattctttttttttttttttgaaatggactctcactctgtcgcccaggctggagtgcagtggcacaatcttggctcactgtaacctccgcctcctgggtccaagcgactctcatgcctcagtcccccaagtagctgggattacagatgtacaccaccatgcctggctaatttttgtactttttagtaagaaggtttcaccatgttggccaggctggtcttgaactcgacctcaagtgatccacctgcctcagcctctcaaagtgctgggattacaggcatgcgccaccacaccaggctgccctgctggattctttttgacgttcctatgccccaactcattcattccatgacttggcgctcttcatcactatcttccatgaagagtttcatagtcttccatgtgatatcaaaactagacaaagatagtaccaaagactatactttcagggatcatttctgtagttcattattagagaggtctctctgaatgagtagagcactagaaaccacagaaggaggcacagtggtctctcctgagcataaagctggtttttgatgttgctttgctgcaactgccattcgtcactgatgactgttttcttcctctgggagagtaagagggagaggacactatctgagtgtttcctctttaatcatcagtcaaaaacaaaaagtatcaaaaagagaaagaaacctacaaaccaaaatccatcatgaatataaatgtaaacatcctgccttttttttttttttttaaagagatggggtctcattaatgttgcctaggctagactcgaactcctgggctcaagcaatcctccctcctcagccctcctgagtagctgggattacaggcatgcactaccacacctgggaaaattttttttaattaaatgtaaacacccttaacaaaatacagtaagtaaaattcagcaacatgtaaaacaactatacactaggaccaagtggaatttatcacagagatactcgaggctggttcattattcatgaatccatcaatgtaatccctcatattaacaggctaaagaagaaaaatcacacaaccaaaaaactgatgcagaaaaatcacttaataaaagtcaacacccattcataataaaaacactcagaattgatggatatcccaactacactaatttgatctttataaattatatgaatgtaccctgaaaatgtgtgtctctattatgcatcaattaaaaaaacagaaaaaaagccactcagaaaactagaaatagtttcctcaacttgataaagatcatttaaaaaacccaccaagcaaagtttgtaattacacataatggtcaaagtctgaatgtttttcctctaaggtcaggaagaagatgagcatgtctactctcattattcctatttaacataataccggaagttctagccaacagaataaggcaataaaaggaagtaaaagacacatagactgaaaagacagaaagaaaactgttcctatttgcagatatgtcctatttgtagatgacatgatggtctctgtaggaaatcttaaggattctaccaaaattcctagaactaataagtgagttcaacaaggcttcaagatacaagatcaacatataaaaatcaattgtaattttttttttagacacagggtcttgctctgatgtccaggttggagtgcagtggtgtgatcatagctcactgcagtctctaactcccggactcatgggctcaagcgatcctcctacctcagcctcccaagtagctggatctacagacacatgccaccacacaagctaattttgaaaaaaaattttggagagacagggtctcactttgttgcctccctaggctggtcttgaattcctagcttcaagtgatcctcccaccttggccttccaaagtgatgggacaattgtaactttatagaaaaccaaaatttaaaatacaataccatttataatctcttaaaaattaaatacctagttataaacctaataaaacatacacagcacttacatgttaaaaactacaaaacactgattaaagaaattaaagaagatctaaataaatagtaagacataccatgttcatggattaggaacctcaacatagtactgatatcaattttccctaatgtggtaagtttaacacatccctatgaaaatccagtattttttatagatgtagaagagattattctaaaatttacataagccaggaacagtgatacaggtcttagtctcagctactaggaggctaagatgggaggatcacttgagttcaggagttcgaggccagcctgggcaatatagtgagacctcatctcttaaaaataaaataaataaaactcataaggaaaagcaaaggaactacaatagcttaaaactgttttgaaaaagaaaaagtgggaggaatcactctacccaatgtcaagacttactgcatagctaaagtaatcaagactgagtggtactggctaagggacagacacataagtcaatggaacagatagagtaaccagaagcagacccacacaagtacaactaactaatttttaacaaaggcacaaaagcaattcaatgttggatggatagtcttttcaataagtagggctagaataactggatatctacgggcaaaaatgtaaacctcaaccttacacattatatacaaattaaagcatagatctaaatggaaaatgtaaaatcataaaatctttggaagaaaacagaagaaaatattctggacctaggatttggtgaagagttcttacacttgacaccaaaaagtgtgatccatagggaaaaaaaatgataatgtggacttcattacaattttagttttgctctatgaaagactctgttgagagaatgaaaagacaagctactgactgggagaaaatatctgcaaaccacatatctgaaaaagaaccatatgtggatacataaagaactctcaaaactcaatggtaaaaaaaaaaaaatccaattagaaaatgggcaaaaggtataaagaaacaatttgtcaaagaggatacagaaatggcagagaagccctatgacaacatgttcgacatcattatccattatggaaatgcaaattaaaaccatgagatattactatacctctattagaatggataaaatgaaaaacagtgactaccaaactgagaattcagagaaactggaccactcatatatttctgaaagaaattacagaagacagcaataaatgaaaagataccctctgttcatgcattggtagacaatatcgttaagctgtcaatgttacccaaagcaatctacacattcagtgtaatcccttctcaaatcccaatgatgttttttacagaagtagaaaaatccattctaaaatttatatggaatctcaagagactctgaatatccaaaacaatcttgataaagattaaagctgtagaactcacactcctgattttaaaacttattacaaagctacagtcatcaacagtgggatactggcataagacagatatacagaccaatgaaacagaataaagagaccagaaacaaaccctcacatacctggtcaaatgattttgacaaggatgtcaagaccactcaataagaatagtctttcaaacaagtggtgctgggaaaactagatatctaaagaatgaagttggacctcaccgtacaccatataaagaaattaactcaaaatgtatcaaagacctaaacataaacataaaactataaaacttttataacaaaacacaaaggaaaatctttgtgacattcgatttggcaatgaattcttgaaaatgtcaccaaaagcccagacaacaaataaaaaaatatataaactggacatttaaaatttagaacttctgtgcatcaaatgacacaagcaacagagtaaaaagacaacccatctatataactcaacaaccatcaccaaaaattcctattcgaaaatgggcaatgaagccaggcaggtggttcatgcctgtaatctcagcactttgagaggccaaggtgggggatctcttgagcccatgagtttgagaccagccagggcaacacagggagaccctgtctctacaaaaagtaaaaaaaaaaaaaaaaaaaaaaaaaaaaaaaattagccggatgtggtagcatgtgcctgcggtcccacctactcatgaggctaaggtaagaggatcatctgagcccaagaggttgaggctgcagtgtgagatgtgttcacgccactgcactctggtctgggcaacagagcaagactctgtctcaaaaaaaaaaaaaaagaaaagaaaagggcaaagaacatttctctgaagaggatatgcaaatggccaagcacatgaaaagaaactcaacacctctaatcattagagaaatgcaaatcataaccataattaaatattacttaatatccattagtatggctactatcaaaaaactagaaaataacaagtgccatcaaggatttggagaaattagaacccttgtgcactactggtgggaatgtaaaatggtgcaaccactatggaaaacagtatggcagtttcttaaaaaattaaaaatagaattaccacatgatctagaaattccagttctgggtataaattccaaagaactgaaagcagggactgaaaaagatacctagaaattccagttctaggtataaattccaaagaattgaaagcagggactgaaagagatacctgtatacccatcttcatagaagcactatttgcaacagccaaaaggtggaagcaacccaaagtgataaacaaaatgtgatacatacacacaatggaatattatttagccttaaaaaggaaattctgacacatgctacaatatggattaaccttgagaacattatggtaagtgaaatccagccataaaagtacaaattctgtatgattctacttttttatgaggtacccagaatagtcaacttcacagagacagaaggtagatagaatggtggttgccaggtgctggatgggagagggaatggggagttattgtttaataggtacagcttcagttttgcaagatgaaaggttgtgtggatggatggtggtgattttagtttaacaatgtgaatgtccttagtgccacagaattgtacacttagaagtagttaaaatggtaaattttatggcatgtgtatttttcttgttttgttttgtttttctgagacagagtttcgttcttgttgcctaggctggagtgcaatggtgcagtcccagctcactgcagcctctgcctcctgggctcaagtgattctcctgccacagcttcccaagtagctgggattacaggcgcccgccacccaacccagctaattttttcatatttttagtagagatgaggtttcacaggtctcactctgttgctcaagctggagtgcagttgcttgatcacgactcactgcagcctcaacttcctgggctcaggtgattctcccacctcagcctcttgagtagctggggctacaggtgcataccaccacacccagctaatttttctattttttttttttgtagagatgggtctcaccatgttgcccaggctggtctcaaactcctgggctcaagcaatctgcccaccttaacctcccaaagtgctggattacaggtgtgagtcactgcacctggccaattttaaaaatttttttagaagttaaaaatagtcagctgggcattgtggctcatgcctgtaattccaacactttgggaggctgaggtgggaggatcaactgaggtcaggagtttgagaccaacatgtgcaacatagcaagaccctgtctctaccaaaaaaaaaagagaaatagtttttaaaaagtcagcattatataaaacaaaaacaacagagagggaaaattcttacagtgtaaaagggattaaagaataacaacaaaatgcaatctatgaactttaaattttttttagaaaagaaaaacaggccaggcatggtggctcatgcctgtaatcccaacactttgggaggccaaggcgggaggattgcctgaggtcaggagttcgtaaccagcctggccaacgtggcaaaaccctgtctctactgaaaatacaaaaattagcctggcgtgatggcgtgcgcctgtaatcccagctacccaggagggtgaggcaggagaatcactggaacctggaaggcagaggctgcagtgagccaagatcacgccactgtactccagcctgggcaacagagcaagactccatctcaaaaaaaaaaaaaaaagaaaaatggaaacatctgtgagacatctgagaaaacttgaatatggactatgtatttgataccattagggatctactgttaattttcttaggtatggcaatgttatcatggttatgtagtaggatgtcctttattttagatgcataaggaaatatttagaagtgaaatgtcacaatgtctgcagcttacttcaaaaaggtttgacataaaagaagacagattgagaagaagaaaaaagataaaccacatacggcaaaatgttaaaaactgtggaatctatctggtgggtatagcaaatattcattgtactattctctcactttttttttttttttttgaagtctcattctgttatccaggctggagtgcggtggcacgatcttggctcactgcaacctctacctcctgcgttcaagtgattttcctgcctcagcctccctgtagctgggattacaggcgtgtgccaccatgcccagctaatttttgcatttttagtagagacagggtttcaccatgttggccaggctgttctcgaactcctgacctcaggtgatttgcccgccttggcctcccaaagtgctgggattacaagtgtgaggtgccacgcctggcctctcacattttatgtatggtttgaacattttcataataaaaatacgggggtgagaggaaagaaagtcttagaagcagcaaggctgaaacagcaagacgatcaagattaaagtcagaaaaactttttctgggcaatgaagattgcctgcctctccccactttttcatgtttaatagaaggctgatcttgcaatcattctctgcactagaaatagttcattgagttggtcctgtggcccacttcccaacccatcagacagtaggctgctttactgccaaggttacccagagctctttggttttcaaagttacaaccagcaagtgacaaaagcatgaaaaggtcaggtgaccaagaaaaaaacagctccccaactactgctgtacaaagccaagacaatactgaaaagtttcctttccacaactatgttatccaaagaaagtgcaagcatataaaatgtagaaagaccttcttcccagagataaacactgtcctaattagtgtttcttattttattatcaaatggtgaaactaaattcaattcttcctttcctttgtgtattttctgcttcccaaatttaattattaaccagaagatagttttttattcatcaatgaaccatgaaacgtgtcacttaattatttaccttttaattaaaaaaaagaaaacctagtaagtattaaaaaacccacaatgacccacactcccagcagccggaattaaccactgttaatattttggcatatttgcttttttctacattactgctttttaaaattatgtatgttgaatatttactgtctattttgagggaaaaaaaggaatattacataaaaacctaaagtcatcattgatcctcaccccccagaggtcaccactatgagtttgttgtgtatccagccagtcttttttccttctttttttttttttttttttgagacagagtttcactcgtgttgcccaggctggagtgcaacagcgcgatcttggctcactgcaacctctgcctcccgggttcaagcgtttctcctgcctcaggctcctgagtagctaggattacaggcatgcgcaaccacgcctggctaattttgtatttttagtagagacaggtttctccatgttggccaggctggtctcaaactcctgacctcaggtgatccacctgtcttggcctcccaaagtgctgggattacaggcgtgagccaccacgcctggctgtcttttttccttttaataaaaatattcaaagggcgggcacagtggctcatgtctgtaatcccaacactctgggaggccaggcattcaacactagccttagcaacacagcaagacctcatctctacaaaaactaaaaataaaaaaattagccaggcatgatggtgtgcatcagaagtcccaactacttaggaggttgaggtggggggatcacttgagcccaggagttccaggctgcattgattgcaccactgcactcaagcctgggtgacagagtgagactcttatctacaaaaagaaaaagaaataaattttttcaaacatataccatacccagcaatgacactgccctctaacccccaggtctacctgagcatgtggtcaccaatgactttgtaagttctacctttagaagacgcatagactcagcagacccaataatgcagcttacgtcaaagatgctgctttcatattataacttatttcttattttccttggattcagactcagaatttagacatgatagatgactgatagatgacaaagaagaagaaaccaagagctaaatagatgtagtttgcccaagatcacaaagctaagtaaagattaacatcatcagaacctaagtgagcaggtaccctgactctgaactttttctttctgctgaaccccactgttttcctgacaataaagccagtcgtgggtacaatatatgtgaattctaaacaatcatctctgttcttcccatcttatatgtaaatagttaactcactgctcactgcttttataacaactgtgcatgaacagccaggtatgttttcttgtttgtttatatttcattatcttgcttccctggaaatgaagaaaaaaattggaaattttatttttacccagtttttctccatgatttatgctttctttatcttgaaaattaaacaattaaaatactaatatattcttcttatatcctgtacactttgtgtcttgaatgttttacaaagtgaatcctcatataccaatctgattcatctcatcatagaaaactgacgtgaacaatttggtatgcaactctcagtaatacatagttttggtgtttttctgttggggaagtatttgtttttacataagcaaaacaataaaatatgtcactgctctgcaacatgctttttttcacttaacattatacctcagagatctttccagcttagtacatagaaccaaatctcatttttaaaactgctggtcaggtgcagtggctcatacctgatcactaatgatgttgaataccttttatttatttatttatttatttatttttgagacagtgtctcgctctgttgcccaggctagagtaaagtggcacagtcttagctcactgcaacctccgcctcctgggttcaagtgattctcctgcctcttgagttcaggagttcgagaccagcctgggcaacatggcaaaaccctatctctacaaaaaattagttaggcgtggtggttacaggggcatgcctatggtcccagctactcaggaggctgaggtgtggagactgcttgagcccaggaggttgaggctgcaatgagccgagattgagccactgcactccagcctgggcaacagaatgacatcttgtgtcaaacaaaacaaaacaaaaataaaaaataaatcaaataaaactgttgtactgtattattttgtttttatttaaccagctgctatgatggaacattcaggatttttactatttatgtttgctattgcaaacaatgctacggtgagcaaccttttatgtccatctttggcacaaacacaaaagtttctacaaggaagagatctaaaagtagcactgccaggttaagaggtgcctgcattttaaattttgataggtgttgccaaattgttcttttaaaccgtttacctataatatgccagagtacctgtttcccacaagtttctaaattatgtgttaccactcttcaactaatgctaaatgagtggctagaattctgagttacaactcacacttccctaattacaagggaagttgtcaaatgtttattgattatctacatttctttttctatgagtgcatactcatattctttacctactttctagtcagtcatttgagttttttcagaataatttacatatttcatcatattttaaaagttgtattgggccgggtgcagtggctcccgcctgtaaacccagaactttggaaggctgaggcaggtggatcatctgagaccagacgttcgagaccagcctggccaacatggtgaaaccctgtctctactaaaaatacaaaaatttgctgggcatggtggtgtgtgcctataatcacagctactcgggaggctgaggcaggagaatcacttgaacccaggaggcggaggttgcggtgagctgagatcatgccattgcactcccggcctggagacaagagtgaaactccgtctcaaaaaaaaaaaaaaaaagttgtattttggccatgtgttgcaaatattttctccaattctctagattttgtttatagtctctttttcatgccgaagtttaaaaatgttatgtaattaaatctgtgtatcttcacctttaagcttaagggttttatgtcttcctcttgtgccttccccagtcagtattataaacaaaataataaatgtcaaatttcattctaattatatatgttggtttataaaaaacatttagttctttattccactggaatttttttactttcgtgaagcaggaacccaactgcattttgttcccccaaacaggaatgactattccaagatcatatattattttaatcctctgatctggaatgacactttcagaatttgctaaactgtcgtatatagttggatctattgtttggatctctatctgaggcatttacctattctcacaggaatactgcgcttaaaaaaataatcagagctttaaggtatgctagctagcacttgaacttgctagtatacagattacttttatagctgatgaggcaagtccttctatcattgtttcaaagattccatggcttttactgaacattttcttttttcttttttttttttttttttttttttttttttttttttgagacggagtttcgctctgtcgcccaggctggagtgcagtggcgcgatctcgactcactgcaagctccgcctcccgggttcacgccattctcctgcctcagcctcccatgtagctgggactacaggcgtgcgccaccatgcccggctaattttttttttgtatttttagtagagacggggtttcaccgtgttagccaggatggtctcgatctcctgacctcgtgatccgcccgtctcggcctcccaaagtgctgggattacaggcgtgagccaccgcgcctggccgaacattttcttttttctttttttttttctgagacagccttgatctgttgcccaggctggaatgcagtggtgcaatctcagctcactgcaacctccaccacccaggttcaagcaattctcatgcctcagcttcccgagtagctgtgattacagatgtgcgccactatgcccagctgatttttgtatttttagtaaagacagggttacaccatgttggccagcctgcttttgaactcctggcctcaagcaatccaccgccttggcctcctaaagtgctggggttacaggtgtgagccaccacacctggcctgaacattttgtctttcagaggaagtgtaaaatcagcttgtcaagttccataaactcttctgctgggaatttgtattataatcatactgcatctggacagtactgagctccctactcaggaacatgattatgtctctcctttccttcctctcattttatatacccttgtgtcaagttttatatttttatttataaaataatctttaacattcttattaggttgattcctaggtattttgcagtttttgtttctattttgaatgtcatgaggaatctgatacggtttgcctgtgtccccacccaaatctcatcttgaattgtaactcccataattcccatgggtcatgggaggaacctggtaggaggtaattgaatcatggggatgggtctttccctgtgctgttcccatgacagcgaataagtcccatgagatctgatggttttaaaaatggcagtttccctgcacaagctctcttctcttgtctgctgccatgtgagatgtgcctttcaccttccaccatgattgtgaggcttccccagccacgtggaactgtgagtccaataaacctctttcttttgtaaattgcccagtctcaggttatgtgtttatcaacagcatgaaaacagactaatacagagtccgttacattttttcaaagaacttgctaaactctaattagttctaacagttttgtctattgtcttaagttttccagttagtaaatcaaagcagttttctctcttcctttttttatttacaatttatttacagtttttatttcaactcattaattcatcaactttttattgagcacctactgtgtgccaactgttcagagcactggggatttagcaataaatgaaaggacaaaaaatcctcggaacaaaaccagaacttaattttaagggagggaggcgtgagagaggagagataaactaaataagtaagtaaaatacacttgtcatatggtggtaagtgggaggttgtgagtcctaagaggagggtagagtgcagtttaaaagcaagatcaggaaaggcttcatcaagaatacctttgcataaagacctaaaggaagtgagagcacaagctatgcagcaagggcaaaggccctgaagggagtgtcactgagccggtatggctggagcagagtaggtgaggaagagagttgcaggagatgaagaggaaaaaaaaaactatgtgtgtaggggggaagattagttaaggtctagtacttgattatttcagcttttacttgtagtgcttagagtgcttcaaaaagaggtatgacatacattttaataatatcactctatttgctgtgttgaaaacagactgaagggcgataaaagttgaacctgagagaccgattaagactctactgctggacaggcatggtggcttatgcctgtaatcccagcactgggggaggtcaaggcaggcagactgcttgagcccaggagtttgagaccagcctgggcaacatggcaaaatcccgtctctacaaaaaacacaaaaattagccaggtgtggtggcacacatctgtagtcccagctactcaggaggctgagttgagaggattgcttgagcctgggaggcagaggttgctgtcagtggagatcacaccactgcactccagcctgggtgacaagagtgagaccccgtatcaaaaaaaaaaaaaaagagtctactgtaataatccagtcaatggatagatgattatttctttttttgttttgttttgttttttgttttttgagacggagtctcgctcagtcacccaggctggagtgcagtggcatgatcttggctcactgcaggctccgcctcctgggttcacaccattctcctgcctcagcctcccgagtagctgggattacacgcacctgccactaagcccagctaattttttgtatttttagtagagatagggtttcaccatgttagccaggatggtcttgatctcctgacctcgtgatctgcccgtctcagcctcccaaagtgctgggattacaggcgtgagccaccacgcccagccttatgattattgcttttgcttatcttattaaattagctggaaccttattatattagtggtttaaatcaggaatgagtgttaaattttaagcagattttttttggggggggggaacatctaccagtctattaacttcattaatagatttcctaataatgaacaattcttgcatttattggacaaagcctacatgtgcatgaagtagtactgttgttttaccatgcttctagattcaatatactattgttttacttaacgatttttgcatttgtagctctcctttgtgctttcctaatcaagtaccaggattatgccagcctcagagaatgagtgggaaagcagtttctgaggactatactcctctcagcacactttccatttctacctcccctggtaacacatcctgtgaccctcccaagccagtgtcccatcatgatttatccaggtgcaagtcaggtcaactggagtcctttccagggctatctcactctaaagctagaagagaaatggcctccaggatcaccatgcaggaagaatgtggtttggggctacagtaaccatcttccctgccttggggaagatatattcgtaggagaatgcgcaaccaggtagtgagaagcagacgagagacagcatagacagagttaactgttctgatagcagagtcttggctccagtccctaaggcactagttccagcaactcttcctataagtctatctccccaatatcctttccagccaaataagccaatacattccatttttttacttaaatcctttgagttggattactgtcacttgcaatggaaagcattcttaatataaaatcaattccaggaagtgtttagggttgaaccacactggtgtctacaagttattttgaaaagcattaaaaaaaaaattggatggatagagaaaaggatctgccttatatgagaaggcaaatacaacaaatacattaagtatagaatctaggtatggtatatacaaatgttcactgaacaattcttgaaacttttctgtacttgtgaaatgtttcacaataaaatgttggtggggtttgggaatcaacagcagaagtaataaaagctatattggcattaatctagactttcggtgctgattaaaaagagctcattgcaggactgctatgggtttaagaaacctggccctgcattaaagcagcaatcatttacctccctttgcaaaactagacatggggagaaaaggcaaaaagccaggatgtgcagtaaggcaataaatgacacttcccactgatgtctttgctggaggaataacctgcaatggaaaaaagctagccaatgttcctgctgtcatagctaatacatggctgaccaatgaccataaggtgactcaaactgaagggacaaacacacacatatgatatgccttgatatgcctgaagaatgtgctggcatcactgaattattcaatgatttaaattttctcccagtactttcatgtagctcaccagagccattagtaatcctaagcaatgtaaacttcattccacacagctacctccctggtaaaaataaacagttgactaatccatatccattctctttttcttatttattttttattttatttttttgagatggagtctcactctgtcacccaggctggagtacaatggtgcgatctcggctcactgcaaccaaggttcaagcaattctcctgcctcagcctccggagtagctggagttacaggcacctgccaccatgcctggctaatttctgtatttttagtagagacagggtttcatcatgctcgccaggctggtcttgaaccactgaccttgcgatccgcccgcctcggcctcccaaagtgctgggattacaggcatgagccactgcgcccggcctccttttctttcttagtagagtaccacaactttatttgtggcagcaataggtccaggtcctttgcctccagagttgatcaatgagacatacacagaagtcatcaagcagaagcttccaagacagctctctaaagagaactgactcaacaaggaaaccccttctgtttccctttcttgtctgacagacatgatggctggagttcctacagccattctgtgatcatggagctatggtgaatatagaaaccacctgctaaaagacagcagaacacaaacacagaagaggcctggttccctgatgactctaacaggaccggcctgccttcctccaacagacatcttcttcaagttaagtcattactgttaagcatctcgccagctgccaaacttagttcctgataggccaccttatctaaaatggttaaaactcatgtccgatggcaattcatgtctacacctatttcatgaattggtatgcataagacactctacaaactaaattccagaacttcagaaactgttacccaccacaaatggaaaatgttatctgaagtttgttcactatattccagtgtatacaacactttattttccattttcttccttctctctggcattctctgaatatttccttacagaatctgttctttgtaaagtcagtttcacaagtcttcaatcacaaagcattcacaattcctttccttcacttatttgaccattaaaaacatgctaaatctaaatgcaatgtgaaatcctgagttggatcctggaacagaaaaagaatgtgtggagaaaccgagaaaattcaaataaaagctggagtagtaaactccaagtaaacaaaagtttactaagtaaacaaatctattataccaatattaatctcttagttttgataaatgcaccagggttatatgtaagatcttaatattaggggaagctgcgtgaagagtatataggaacactctgcaccactttagaaattcatctataaatttaaaattatttcaaaattaaaagttaaaaacaaaaagaatgccaaatgagctgccttttcttcaaaccagagctaaaaatcacagataacaattttaaatatccaagttgcaaaccctgctttgcttttctttcttttttaaaaattttagggcaaaaacaataatttaagctgtgttacttaaagggcatttgtgtctcattcactcccctctccaaaggtcagaacctcagagaagaccccacaagctgtgaaacattgttaagatattgtgtactattaatgccacaacactcactaaataagagtcctcagtatactgtcatcccagatacaagtgaaaaggaagttatatataggcctctatccctggaccagaaataaagccatacaagtctaagtaagcataccctttttacttctacaggcaccacaccaagccttcctggccagcatccaagtaaactggaggctgaagcttcacattttcaggtattccagggcattggcttgctttgcattttgaattttcttaaggctgggaccatctgtaccgtagttattacttccgtagatctgtaaaccctccaagagaatgaggggtaatggcaactagctaagaaacacctgaagagataactaacctctgtgaggctttaattaaagtgctttctctagagtatcactatcatgaatcactttcttttttttttatttttgagacagagtcttactctgttgcccaggctggagtgcagtggcgcgatctcagctcactgtaacctctgcctcttgggttcaagcaattctcctgcctcagcctctccagtagctgggattacaggcacccgtcactaggcctaatttttgttatttttagtagagatggggtttttccaaggccaggctggtcttgaactcctgacctcaggtgatccacccacctcggtctcccaaagtgccgggattacaggcataagccacagcacccggctgatgaaccactttcttaccacctagctcgcaactatgactcttcattctctgaatacccatgaaatttaacatagcccacagcttcacctgtaattattatctttcattcaataaataattactgaagcagtgtttcataatagctaacaatagcagttcatactcagcgagtcctatgtgccagacaccaatctaagcagcaagggaaacaatgtgagaaatggcaattaaaaatagtcccagccccctgatactttccaggggtgatagagaagatccttcccaatgaccctcttgacaataaagaaatcctacctatgtcacccaagctacctcggtatggggagggggtgaccgtggggagggctcccccgcccccttttgatacagaaagatctgtagaatctttctatagaagatggtagaagggacgccagcacgggaaatccttaatcagactgttttgctagagcacatcctccagtagcttcttcataaaacgggcatgtgaggtcaaattttgagaacttacatgtgtgaaatatcttcatcctttcttacacctgcctgagagtttggctgggtgcagaattctgggtgggaatctattttccttcaaaaggcactctttgctccactactttctagcttacaatcctgctagaatcctagcattcctgatcctatctatgtgacttacagatattgtcttcatggtgctagaaaatttcatgatgctatgccaggacatgcatatttttattttaaattgacagatatatatatgtatttgtgtacctgatgttttgaagtatatatacattgcggaaaagttaaatctagctaattaacaaatgcatcacctcacatagtttttttttgatgagtacacttaatatccactctgtttgcatttttcaagaatatataatcattaactatagttaccatgttgtataacagatctcttaaactaattcccctatccaactaaaattatatatccttcaatcaacatctccccatccccgctacatcctaattaccaccattctactctctacttctataagatcaactttttttttttttcttgacacaggatctcactctgttgcccaggctggagtgcagtggcatgaacgcagctcgctgtagccttgacctccttggctcacatgatcctcccatctcagcctcctgagtagttggaatcacaggcgcatgccaccacgcctggctaatttttctttttttgaactttgtaaagatggggtctcgacatgttacccagactggtctcaaactcctgggctcaagcaatcctcccaccagggccaagatcaacttttttagattctaccgcatataagtgagatcatgtggtcctggcatggatattttaaaattcattgtgctagattcttcgcaagtcttttcaatctggaaacgtatgtcctttggttctaaggaatgtatttatttttttatcatttcttcatgtcttcaaacaataactacctgctatctctccctgttacagacatctacaggtccctaggtcattctgttaatttatgataacctcaatcttcaccacaatctttacctctcagtgccttgattcccccacttccaatggtggtgtcctccatcctacttcagctattcccttccacattgccacatccaagcagctcaacacagctgcaggaaaagtgtacaactatgctaagtagggtctcacctaggtttacaactacaaacatcaaatgggcactaggtgctgcctggaaatcctaaaacttttccttattttcaactcattcttccccattctcttggatgaatccaacacctctcttcatttttagctgaagaccttccttcttatttacctgagaatacagaagtaatcagaagagaacttccactttctcccaccaacaagctaccagcatttgggttcacataatctgccaccaatgaattgttggcattgctcctgtctaacttgaggccaacatccccatttacatactagatcccattccatcttacctactcaaggacttcacccttgcaagtgtcacttctctttaatcatcaattgtccctccctactgcatcagcccatcaatttacaaacatgctataatatctgcccatataaaaacaaaaagaactcgacacctcatgatcttccaactacagccccattactctactctccttataaccatcctcaaaagaacatcaatatgactgtctatattcagtgtcttcaattctcctctcattttctgctttgtaaattaatcaatttatgttttttagagacaggggtcttgctatgttgcccagactggacttgaattcctggactcaagggatcctcccacctcagccttccgagtagctgacctacaggtgactggcttcattttctcttgaacccactgcaccaaaactgttcttgtcaaggtcactagtgaccctccacattatcgaatctaattgtctattattagtccttttgttttcttgagatggagtttcactcttgttgcccacactggagtgcaatggcaagatcttggctcactgcaacctccacctcccaggttcaggtgattctcctgcctcaggctcccgagtagctgggactacaggtgcctgccaccatgcccagctaatttttttgtgtgtatttttagtagaggtggggtttcaccatgttggtcaggctggtctcaaactcctgacctcaggtgatccacccaccttggcctctcaaagtgctgggattacaggcgtgagccaccgtgcccagcctgattactagttctcatcacactgtcaacaatctcattcggctttcaatgtctgttctcaattattctcccacctcagaggtaggaaaccattttctctcagaacttggaagacactgctacactgccttttcttcttctagtgttcttaatactaataaatggcaactccattctttcaatagctgaggcaaaaaccgactaggccttcttgtattattgttctttcggccgtatttcttcctcagtacttatgactcactattctatattatgatttctactgttactgtctcttcccctttacaaaagagttatttgagggcaggggactgctgtatttatctgactctacagcacctaacagagtacttgttgcataatttatataaataaacagtgaaatttaaactattaaagaagtttcaagcaggaacagatcgctctacagaaaaacattttgaagtagaaagtatctttcagctagatttccactggttccttagcattgatccagataggttagtttataccttggtaataagtccaaaatcccggtggtgtttcacttcttgctcaacctacctgtcaagcataggtcacctggaagctagctctggggccttgactgatgggtggctgccatttgcagccccaacagctaccatgacagaaggaaagagaatggaaaactacacaacagaaatttgtaccatgaaaggctacacagtattcccacgcatttcactgaccaaaagcaactcttaaggccatacctaacttcaaagaagcaagcaagtaaaattctactacatgctcaagagacagaaaccaaaaatacctggtaagactgatgactatcacatgcttaaagagaagcctctcattctgagtaacaatattttaattcttgatctccattctccatctgtgaaaatgaactaccgtgctagaaccatacacttgcagagtactatctatgggtcttaggaatgtcacttcaccagttaggtttgccccttccatcactcagcagtcagcagcaaagccatatatgggtgacaggaaagtgctagtaacattcaatgtcaagagtaagggaaaggcttgaatgggcaagaaaagcacgttcaatcatgtagaagtggggaaaggagggaagccttcagcaaatttctttcaccaaaggtattgggggcagctaggccttggggttccttgcactattccttgtctgaaatcaaattttattcaaaccacttgatagaagatttggagttcgggtatgatcagtaaagtgagccagcatacttctttgaacatagaatcactacctttaaaagaataaataaaaagcacatggccatgctactaaaaacaagaaaggcagcatttaagagacagattctaaggtagagatgatttttttccccctaaagatctcaacagactcaaatccaaattcctaagctcaagatgatctgggataaacctcaagtccacacagagcctagatttaacggatggctgttctaaagtatcctatgcaatgtctatacaagttcaaatactttctgcttcagacagtgaaactggcagaaatgttgcaaaggattggagatgcgttactataagcagttaaacttggaactgtaaagcccacaaggaattacactgaagggcagagcaggagttcaaaaatgtcacctgacagattcgaagcaatttaggactcctaaatgcaatgtttcattggtatctaccccccaccttctctatcctttatttgttcaacaaacatatactggattctgggttgtggaaaggaatgcagggaagtaaaaaagaaacaggtttctaagaatcagtttcttgttctccaataatttggtctagttaaagcaaacaaacaaccccaaaaatcagatcagcaagcaaagttaaaacatatgccttaagtaccataacaagaatataagaaaactgttttaacatgtagattggcaacctcctttcaagggaacaatatatttgctttgctatgtggctagaataagaaaaagcaaacaacaacaaaaccctctcctgttttaatgacagtttagcagtaccaaagctcatcgctcgcattccccctctccctctccttctcaaaggtctctgctgcaacccctccatcattccaacctccacactgcgccggcgccccacaccagctccatcacaaacaatgcccagaccaacaagatcagcaccaaacgcatagggcacagaaatcggaaacggatcttcctatatctaaagggggcggggaacgctccccacgatcaccccctccccatactgaggtagcttgggactgtgtctctacggtaaggggcctggcgtccgccgctttcggaggttctaggcctctttcccctatttatccagtttttcctcctgcgtccctaatacctctacttcctcccaacccgagctccctattgtggagtgagggggcgtcgcgatgcaggctgaggcagggggagctggggaaacgcgcgacaggggagatgctgtcattatgtacgtagggggcgggggacactctttaaggaagccgttgtcaagggcaaaggctctagagacccacgggagggggctttctaggtaatccatttgggggttctacacgagggagctattgtgtgtgtggaggtgtgaggtctgtagagtagcagtttctgagggaaacattccctggggaaggcgagtgagttattcatagggaagcctctgtggggttctgtgtagaagaatccttcctgggagaaacgttctatgggggtgaggacgtcataacagtgtcttcacagggaatcgctgtccctagggaagccattgtggggaaaccgttgcagggttgtctgtgggggagccattgtggggaaaccgttgcggggttgtccaaaggggagccattgtggggcctctacagagggcgccgttcctgggaaaaattcctccctgagccgttcagcaaagaaccgtcccgaggaagccatgtcggaccacgccctgcggcgggaggcgtcgccggaccccgacagcccgcatcccccgcccggccgcccctcggctgcctctgccccgcgtacctgacggagggtgacccgcggctggagccgccaggggaccgagcgcggggcagcccctgccggcgcggggggtacacgtccatggcggcggacgactggcggcggaggaggacggtgcagctgcgagggtctcagttgcccgcagggcggctccacgctagctgcggccgggcggggcggcagggcgtgccgggtgggagggggcgcggcgcgcgggcccggcgggggcgggggcgggggcgtggagggggcgcgcgcaccgagagcggatgggggcgttgggagcggctggagttgggggtcggcgcacggccacagggaccccacttcttaagctgcgaggccgccggaccggatgttgggagcgcgtgtccgcagggtgagggttgccacagcgccgcccggcctcgtcctcaagcccggcatcatagagcggggctctgcgcggcgccccccggccacgcacacggacgcgcccgggggcggagcctctcccagcccggccccgcccctccgcctctgcccgccccgccccgcccgaccagccccggcctccagcgaagtcttccgctccggcgtcaggatccagcgcacctccccagtacccagcgcacctccccagtacccggctcgcttccctgttctccggaacggtgtcttcccgcttcctggtcatcaattccgcacccacccttcaaacatccaatagattcctagccggcctcgggttagcgcagcagtgcgcacccagccctgcgcagggcatgagcgttagaggcgcacaggatcccagaagacccctaacctttactgttaagatcctagctctaccggtttctgcagggacatgtacaagaaacttgggaaatactgcactgatagttgccaggagtcctgtatatacaggacgtatttaatgattattggcctgcgtccttcgttgacctcgtcggaatgccttaaatgtcctgtattcatctttttacactaaattgcaataattagagctatttttctcccacagtaattggtgctagatcacttaaattacaacactggctgaaaatccttcctacactaatgaagatttggacaatccctatggtgtctccttcaggtttggctgagggaagaccagaagggagtaggaatttaaagtgctcgtctttcatattcaagaaaggaaaatacttttttagctcaagtccggagtcgtgaacaaataaccaccattatttagagataacttctcgtcggtgcagcagctctgaaaatcagccaatcagcgatagcctcactccggtaactatgcttcttagtaaatcaatgacaaccccacgcttctgaaagtcagccaatcagtgaccgctctaagcctccgacaatagccaatcaacaagtgcctgacaccagcgaccaggcttccgaaagtcagtgggtactcagctgccgcactccacttctgattcggaaagacagccaatccctgaaggcgaatatttccaaaaccatttttttttctttcccagactgagtctcattctgtcgcccaggctggagtgcagtggcgcgatctcggctcactgcaacctctgcctcccggttcaagcgattctcctacctcagcctaccgagtagctgggattacaggctcccgccaccacgcctggctcatttttgtatttttagtagagacgggttttgccatgttggccagactggtctcaaactcctgacctcagttgatccgcctgccttggcctcccaaagtgctgggattacaggcctgagccatcgcgcccggccttttttttctttttctcctttttttttggagacagagtcgcactctgttgctcaggctggagtgcagtggcgtgatctcagatcactgcaacctctgcctcctggttcaagcgattcttgtgcctcagcttcccaagtagctgggattacaggcctgtgccaccaagcctggctaattttttgtatttttagtagagacagagtttcgccatgttggccaggctggtcttgaactcctggcctcaagtgaatcgccagccttggcctcccaaagtgctggtattacaggcgtgagccgcgcccggccttcaaaaccttttataagatcagctctggctttgttcagagaggctgtaccttacaagtaccgctctcccttgcaagcagagaagaaattcactttttttttgcatcagatattgagttcaatttattgttttgtccgagttcaaagttcacagctcaagattcaattcccagttactatttggtatgagtttggacttatgacagacgctatgacaccgtcatgagatttatcaaatacaactctttcaattctttctatgcttgcagtgatcaattttttagctcaagtccagagtcatgaacaagtaaccaccattatttagagataacttcccatcggtgcaaaagctctgaaaatcagctctaaaaacaattcaacggggctacacgtggtggtgcacgcctgcagtcccagcaatttgggagactaagacaagtggatttcttgagcccaagagtttgagaccagcctgggcaacgtggcaaaacctcatctctctgtctctctctctctatatatatatagtttatttataaaaatatatatttatattataatttatgtatacaaatatatttcatatatgcacacacacacaaattggccaggcatagtggcatgtgtctgtagtcgcagctattcaggagactgagatgggaggatcgcttgagcctgggaggtctaggatgcagtgagttaagatcaggccactgcactccagcatgggggactgagtgagaccctgtctcaaaaaaaaaaaaaaaaatcaatgagtataggcacagatttgtgcaaccaccaccacaatcaattttagaacatttttatcactccaacaggaaaatcctgtacctattagcagtcattcctccatttcttcccaaccaccccagccctaggcaaccactaaccttttaatttgcctattctggacatttcatgttatcagcatcattcaatatatggtttttcatgactggcttcttccatttagcataatgtttataaggttcatccatgttgcagcatgtatcagaattttgttccttttcatggttgaatattattacattgaatggatataccacatcttgcttatccatttatctgttaatgaacagtcagattgtttccactgttttgctatgttttgtagctaatgctattattaacatttgtgtacaagtttttttgtggacacacagtttgtttccttggcgatctaggagtgggtttctggatcacatggtaactctacgtttaaccttttgaggaactgccaaacggttttccaaagtggctgcaccatttatattctcaccagcatcatatgtgggttctaatttttccatatcttccctaatactcattatctttttcactatagccattttagagggtatgaagtggtatctcattgtggttttggcttatatttcctgatagctaatgatgtcaagcatctcttcatgtgcttattagccatttggacctcctcctttttttttttttttttttttttttgagacggagtttcactcttgttgcccaggctggagtgcaatggcatgatctcagctcaacgcaacctctgcctcccgggttcaagcgattctcctgcctcagcctcccgagtagctgggattacaggcatgcgccaccgcgcccagctaattttgtatttttagtagagacggggtttctccatgttggtcaggctgatctcaaactcccgacctcaggtgatctgcccacctcagcctcacaaagtgctgggattacaggcatgagccgccgtgcctggcctatacctcttctttggaggaatgtctgctcgaattttttgaccatttttacttggttacttgtccttttattatgttgtggtagctctttatatagtctagatataagtaccttatcagaaatacaatttgcaaaaattttatcccattctgtgggttgtcttttcacattcttgatattgttgtttgaaacacaaaactttaaaattttaatgatatccagtttatcaatttttttcttttgttgcttgtgctctatgtgtcataactaggaaactattgcctaatccaaagtcatgaagacgtacctcttacattttcttctaagagtttaataattttggctcttacattttagatctttgattaattccaaattaatttttctatatgatgtgaggcagggatccaacttgattcttttccatgtggctattcacttgtctcagcaccatttgttgaacagactatttttttccccattgaattgtcttggtacccttgttgaaaatcgattgtgttatctatttctttatttgtgtatatgtgaatccacaaatgccaaattgcaagagtgaattttatgacaaattttctgaagagtgtacatttattaaaggagagaaaatccatttgcagctctttatgtggtatgcaagtatttattcaatattgaaaatggtggaaagacagatatacatcagcacatactaacggctaagcataaaagatgtgtgatttttgtaccaaaggaatggataaaatgacaaattttaaagataaattcagattgagaagataatcacagcaaagttgtaatggcctcccatactgtctgttgtcatcattcagctcaagtcactctttgaacataccgctaccagtagtattttctaatgccaatatttcaagcaaattttcaaatgccaggacaaaatctactgcaataatttgagatgtaacgactccacttactactgttgcagtgattatcaaagctgtaaatgccttgctgttttatagcataaccatggatgtgagtaatcacagtgaagaaaagcttttcctttgcctgtgcaacagtttccttgtgaaaaaggcttgcttatggggctattttgtgtaaaatcccttccagatgagatttcagaaatgaacaaattgttgcagagattctcctaatgaattaggagttattaaaaactgtacagtttttgatggaaaaatacaaataaaatattggtagatgctcgcactatgtttattcaaaactaaagtaaagcttgactgatgctatggaagctattgactgtcctgctcatattctgtgtaatgctgctcaaacagcatatgatgtcttttccattgcctttgaagcaactgtcctgaaattattcttatgtcagcgtttataatatttgaactgaacaattaagatatttttgtgattttgttggcatttagtattcctcaattctcttgcattcaaaaaacctgttagctcttttttttttttttgagatggactttcgctctcattgcccaggcaggagtgcaatggcacaatctcagctcactacaacctccgcctcttgggttcaagtcattctcctgcctcagcctcctgagttgctgagattacaggcatgcagcaccacgcctggctaattttgtatttttagtagacatggggtttcattatgttggttaggctggtcttgaactcctgacctcaggtgatccacctgccttggcctcccaacgtgctgggattataggcgtgagccaccgcgcccagccagcattctttaacatatggatttgagagactcctcagtttatttgaagtactgaaaacatattttaattttaaaggaaaagctctcgggctaggcacagtggcacgcctgtaataccagctactggggaggccacagtgggaggatcccttgaggcaggagttccagactagtctgggtaacatagtgagactctatctctattttaaaaatttaaaaattaaccgggcatagtggcacatgcctgttgtcccggctactcaggaggctggggtggggagagagcctgagcccaggagttcaaggttgcagtgagttatgacctatgcactctagcctgggtaacagagcaagacctcatctctctttgtaaaaaaaaaaaaaaaaaaaaaaaaaaaaaaaaaacagaaagaaaaaaagaaaaggtccccaaatttcttactgacttttaaagtaatccattgagggaaaccttttcagcaataggattatgccaaagaaaaaacagcaaacagcggtattgaaatactccattgcttaagagaactcttgaatgcattaaatgaataattgatgaagaaaaatgtaaccctttaagtgtcaaggctgttcttaaaagggacaacattacttacgaacaagaaaaagtctgacttgaagtgaataattattacagcacttgtcatgattaccttttgaaatggatttcatcccgtgaagaattttattctttttttttttttttttgacagagactcactgctgcccaggctggagtacggtggcatgatctcagctccttgcaacctccacctcctgggttcaagcaattcttgtgcctcagcttcccgacatagctgagattacaggcgtgctttatcatgcctggctaagtttttgtaattttagtagagacagggtttcaccatgttggccaggctgatctcgaactcctggcctcaagcaatccacctgccttggcctcaaagtgctaggattacaggcatgagccaccgtgcctggtcaagaattttattcttttatatggatattaatgaatactcttctagcatgggaacaagtggaatcctcatatttagtgttgaagaagaaaggaataaaaaatgatgataatgctcttttttgttggggggggcagcatttttaagttattgatcaagagatgaaacaatcctgaagaatagaaaatcaagttgtgccatgaaagttggtatttgctttaatgaaccaaatctgaagagcaattttcagggttgttaactttatcctagaatatgttctgtgtattagtccattcttgcactgttataaaaaataccttggactgggtattttgtattttctgtattttatggacctgctacttcaggaaagactgggtaatttataaagaaaagaggcttaattggctcatggttctgcaggctgtacaggaatgactaggtaatttataaagaaaagagtcttaattggctcatggttctgcaggctgtacaggaagcatagtggcttctgcttctgtggaggcctcaggaaacttacaatcatggcagaagacaaaggagaagcaggcacatcttacatggctggaggaggagcaagagagagaggggaaggtgctacatacttttaaacaaccagatctcatgagcattcactatcacaagtgtagcaccaaggggagggtgccaaaccattcatgagaaaccacgcccacaatccaatcacgtcccaccaggccccacctccaacactggggattacaatttgacatgagatttggtggggacacagatccaaaccacatcacttttccccggccctccaaatctcatgtccttctcacatttcaaaatacaatcatcccttcccaacagtcccctaaagtcttaactcattccatcattaactcaaaagttcaccatcaaaagcctcatctgagacaaggctagtcccttccacctatgagcctgtaaaatcaaaaacaagttagttacttccaagatactgtgggggtacaggcattgggtaaataatccccttccaaaagggagaaattggacaaaagaaatgggccacagtccccatgcaagtctgaaacccagaagggcagtcattaaatcttaaagctccaaaataatctcctttgaccccatgtcccacatctagggcacactggtatgaggggtgggctctcaaagccttgggcagtgccacccctgtggctttgcagggtttaggccctgaggcttctctcatgggcttctgttgagtgcctctggcttttccaggtgcaaggtgcaagctctcagtggatctaccattctactgcctagtggaggtggaggacagtggctttcttctcacagctccactaggcagtgctccagtggggaccctgtgtggggactctgtgtgggggctccaaccccacatttccccttcacactgccctagtagaggttctccgtgagggctccacccctgcagtatgcttctgcctaggcatccaggtttttctatatagcctctgaaatctaggcagaggttcccaagcctcaactcttacactctctgcacctgcagggctaacactacatagaagccttggcttatggcttataccctctgaagcagcagcctgagttgtacctgggccccttttagttgtggctaaatctggagtgactgggatgcagggaacagtgtcctaaggctgcacagggcagtggggccctgggcctggccccaaaaaaacattcttccctactcggcctctgggcctataatgggaggggctgccaagaaggtctctgaaatgcctgtgaggcctctttcccattgtcttggatgttagcacttggcttctttcaattttcctgcctcagccttctgagtggctgggactacaggtgcctaccaccatgcccagctaattttggtatttttagtatagacagggttttgccatgttggccaggttggtcttgaactcctgacctcaagtcatctacccaccttggcctcccacagtgctaggattacaggcatgagccaccacaacccgcctggcttctgttttcttatgcaaatttatgcagcctgcttgaattcctcccctgaaaatgggcttttatttcctaccacatggccaggctgcacattttccaaacttttatgttctgtttccctcttaaatataagctcaagtttcaagtcatttctttgctcacacatgtgagcataggttgttagaagcagctgggtcacattttggaggctttactgcttagaaatttcttctatcagatgcactaaatcatcattttcaagttcaaagttccacagatccctagggcagaggcacaatgcatccaacctctttgctaacacataataaaagtgatctttgctccagttcccaataaattcgtcatctccatctgagacctcttcagcctggacttcactgtctgtatcactataagcattttggtcacaacaatttcgcaagtctttagcaagttccaaactttccttcatcttcctatcttcttctgagcccttcacattcttccaacctctgttgattacccaattccaaagctgcttccacattttcaagtatctttatagcaatgacccagtccttggtaacaattttctgaatgtttcttctcacatcgctataaagaaatacctgagactgggtaatttattttaaaaagaggtttaattggctcacagttctgcaggctatacaggaagcatggtggcttctgtttctgcggaggcctcaggagacttataatcatggcagaaggtgaaggagaagcaggcacatcttacatggctagagcaggagcaagagagaaagaggggaggtgttacacatttttaaacaactaagtcttgagagcacacactcactatcatgagtacagcaccaaggagaaggtgttaaaccaccactacgatccaatcacctcccaccaggctccatctccaacactggggattacagtttgacatgagatttggtggggacacagatccaaaccatatcattcagtatgcagcctcatattgctaatgttgagcatgttatctaactaatgaatgtgcaatggacaactgaaataagttagatatgaccattgttgaagctatgttacaatgaaaataactatagattatatctacaaggaattttataggcaaatttcaaaaacaagaatccttaattacagtggtcaaaaatataattagagaaatatataactcagatacttataatttgttttgtataagcaaataaatacttttagtgaatgtcccatgcaataatttttatatcaacatacatatgcataggcaattaggtgtaattctaatttaactgagtccttgtatttttatttgttaaatctggtaaccctagtcatggatgatctgagatattgcatgtaatcgttaacaatgatcttttaaaaataatctgtgacaggccaggcacagtggctcatgcctataatcctagcactttgggaggctgaggcaggcggaccacaaggtcaggatttcgagaccagcctggccagcatggtaaaaccccatctctactaaaaatacaaaaattagctgggcatggtagcacgtgcctgtagtcccagctactcaggaggctgagacaggagaattgcttgaacccaggaggcaaaggttgcagtgagctgagatcgtgccactgcacgccagcctgggccacagagccagaccctgtctaaaaaaaaaaaatctgtaacaatcttttttttacagaggtataatatatttataataaaatgtatatttcatttgacaatatttgacaaatgtatgcaattgtgaaactattaccactccctccccaaatcagtgtcattccatgaccacagaaaattctgggagactctcaatgaaaagtaataacaaaataacaacatacacacacacacacacacacacacacacacacaagtcgagacccttttgcagtcaaatccctcacctaaccctaggcaaccactgatttcatttttttgtttgtttgttttgagacaggatcttgctctgttgcccaggctggagtacagtggcacaatcacagctcactataacctcaaactctcaggctcaagggatcctcttgcctcagcctcccaagtagctgggaccacaggtgagtgccaccatgcctggcaaatttcttgaaaattttttgtagagatggggtctcattgtgttgcccaggctggccttgaactcctaggctcaaatgatcctaccacctcagcctcccaaagtgctgggattatgggcatgagccttcacacccagcccttgattttattttaacgtccgtagattagttttgtctgctcttgaaatttgtataaatggaatcagcatattgatttttgagattcattcattatgctatatgtatcaataatttgttcacttttattgatgatgagtagtattttatagctcaaacataacacaatttgtcgatccacttactaggtgatgaacatttgacttgtttccagtttgaggatattatatataaactcttataaaacatgtatgtataagtctttgtgtggccatatgttttcactcttcttgggtaaatagaagaattgctaggttatatggtacatgtatgtttatctttacaagataaccgtctaacagtttttcaaagtggttgtgccccattttacactcccgtcagaagtgtatgagaattcggtcctggcgcagtggctcacgcctgtaatcccagcactttgggaggccgaggcaggtggatcattgaggtcaggagttcaagactagcctaggcaacatggtgaaaccccatctctactaaaaatacaaaaattagctgggtggtagtggcatgcacctgtaatccaagctacttgggaggctgaggcaggagaatcacttgagcctgggaggcagagattgcagtgagccgagatcgcaccactgcactccagtttgggccacagagtgagaacctatctcaaaaaaaaaaaaaaaaaaaaaaaaagaggtgtatgagaattccagttgtttcacaaccctatcaactcttggtagtgtcagtctttaactttcgtcattctcctgcatatgcagttgtgtcccattgtgattttaatttgcatttccctaataactaatgatgttgggcatcttgtcatattcttatttaccatctgaatatcttctgttataaaatatttttaaagtgctctgcacatttagaaaatgggttgtttgtgttttattactgagttaaaggagttctttattttagagtattttatttcggagtcctttcctggatatatgcattgggaatgttttctctcattggttgcatttacattttcttttgtgttttttttttttgagacagagttttgctcttgttgctcaggccggagtgcaatggcacgatctcggcttactgcaacctctacctcctgggttcaagtgattctcctgcctcagcctcccaagtagctgggactataggcatgcactaccatgcccagctaattttttgtatttttagtagagacggggtttcatcatgttggccatactggtcttaaactcctgacctcagttgatctgcccaccttggcctcccaaagtgctgggattacaggcgtgagccactacattttcttaaaggtgtcttttgtgcagtagaagattttaattttcatgaattctaatgtattattattttttcatttattttagaggagaatgtgctggctctgatgttcagtgacaagggaacagagagaggtaggaaggcctgaaccagccaagagactttacctgaggtaaaaattcctcttccttcaatgcctcaaatcaggatcttgaagttggaaaataataaaagcttgtacagattccactttgattgtttttggcaaggctatttcataactacctgtggtgatctagagggtttctcagaagaaatgacatttgtggagggagtccggaagctgagtgataatgaaagctataattcaaaaccacactaagcactcttcatgtcatcctctgtggtagccagccaagatggcccccagtgatcctcaagtcctgtgttcatgcctttgtatagcctccctcaatactgaatcatgcctggcctgtgaccaatagagtatggcacacattgtgacttccaaggcttggtcatgaaagacatatgcaacttccttttgctttctcttgcataatctgttctagacaaagcagctgccgttttatgaggacactcaagcagctctatggagaggcccacgtggtgagaaactgaggcctcctgccaaaaaccagcatcaacttgtcagtcatgtgactgaaccatcctggaagcagatcttcccactccagtgaaccctgcagttgatcacagccccagtggatactttggctgcagagagaccatgatctagaaccaattagctaagttgctcctgaattcctgactcacagaaactgtttgattaagataataaatatcttatgttgtaacaagtcactaaatttgaaggtaatttgctattcagcaatagataattaatacaacagttctataaggtaagaatgaggtattatctccactatacaaataaggaaacagcctcagaaaggttaggtgacttgcccaaattaactgtcagagaagatttttttcccttgacaaataatttacattttatggcaatttccatggagaggctaggtgcagtggctcaatcctgtagtctcagcactttgggaggctgaggcgggaggactgcttgaagctagtagttcaagaccagctgaggccacatagtaagacccctgtttctacaaaaaattaaaaaaaaatttttttttttgagacagaatttcgctcttgttgcccaggctggagtgcaatggcgtgatctcggctcactgcaacctctgcctcctgggttcaagcgattctcctgcctcagcctcctgagtagctgggattacaggcacctgccaccacgcccggctaacttttgtatttttagtagagacagggtttcaccatgttggccaggctggtcttgaactcctgacctcagctgatctgcccaccttggcctcccaaagtgctgggattacaggcgtgagccactgcacctggccaaaaaatttttttaatttgaaatttatattttaaatttaaattgctcacacctgcaatctcagcacttttggaggctgaggcaggtagatcgcttgagttcagtagctcaagaccagcctgggaaacgtgacaaagctccatctctgcaacaaatacaaaagaattagccaggcatggtggtgtgcgcctgtagacccagctaattgggacgctgaggtgggaggatcgctttagcctgggagacagagactgtggtgagccaagatcgcgccactgcactccagcctgggcgacagagcaaggccctgctgtctcaaaatattaaataaataaatacatttatttccatggagaaacaataaagagaaacatcaaaactcagatggcaaacctcctcagcccttcctgaacctttttcctccccagcattccaacatttctctcaaaaactctcaagcctgcccagctttacctctagcctccctcttgcatttcccactcagcaaagcaaaaaggtggctgcattcgaactgagtttcgattccagctctaacttcaatgtccatgttcctaaccactctggttcccagaagggtttctctaggaagaaaaataagggaagggcattagacgtagagaaaacaacaaatgcaaagaagcgagggtttgacagaatctggctgcctctgagggagtggagggacaatggttcagcggggctagagagcaaacttcctgggaaaggaggtggcagggtgaagcaggaaaggagttcgtagccagtgtgtagaaacccataggccatgtcaacaattttgaatttctctacaacaaaaaattttaggcaggggagaaagttgcttgtgtctgaatttccaaaagactctttagggaaagaaatcattgtattaaaaagagacttgcactggaatatttattgcagcactgttcacaataatcacaaagacaggggatcaacctaagtgtttgtcaaaggagaattggataaaatgtagtatgtgcatataccatggaatactgtaatacttagccatagaaaagaatgaagtcatatcttttgcagcaacatggatggaactggaggccatgatcctaagtgaaataactcaggaacagaaagtcaaatgccacatgttctcacttattagtgggagctaaataatgtgtacatatagacacacagagtgggataatagacattggagactacaaaaggtgagagggtgggagaagggtgaggattgaaaaattacctattgggtacaatattcactattcagatgatgtgtacactaacagccgagacttcactgctaagcaatatatgcacgcaataaagctgcacttgtactccatgtatatataatagatagtaaaatgtattatatattaaaaatgtataatatattaaacatatataatatattgtatatgttatatataacatatgtcatatattatacaacatgttaatcacattaacatatagttatatattataatatatattatctaatatattttaatatataatctataatatatttttatataatttgttttcctaaatatatttcacatatattttatataattatgtattaatatataatatatatttattattatatataaatatgtgtttatatatattacatatatatttttaagaccattcggtagcttagcagacactgttagtgctccttggcacttaccatttccttgcacgctgggtcaggaggctagaagagctggggaattaatgcctgctaggagctgagctctcagtcaatgactgaaggaagttgcgtaaataccccagcttctcacttgtcaggtaggataactctgggacacacattctgtagctattctaagggtttcccagcaggattaagctccagttgcccatttgcttgataatgtgcaatcgactgctctcccttccttgaatctcttccccactctgctgctcgttttcctaggattacctcccacataaggtacttgcactcaaatccttaccttaggtccactactgagcagcaggaggagagggactatgaactaaaacagacagaataagaagtaatatataccatgattattagaatgctcattacaacattgattctttccatgttaccctgtgaattaaatgcaatttctaacaaaatcccaacagaatattttaaaaggaactttaaaaactgatccctggcagggtgcagtggctcacgcctgtaatcccagtactttgggaggccgaggtgggctgatcacctgaggtcgggagtttgagaccagcctgaccaacatggagaaaccccgtctcttccaaaaatacaaaattagccgggcatgttggcgcgtgcctgtaatcccagttacttgggaggctgaagcaggagaatcgcttcaaccccaaaggcagaggttgcagtgagccgagattgtgccattgcactccagcctgggagacggagcgaaactccatctaaaaaaaaaaaaaagaaagaaagaaagaaaaaaaccccccgctccctaaggtcattcataggaaagttctttgcggaaaagatgaacaaggagagagaacttgccctaccagatagcaggatttactataaagctattagccattaagatttactacaggccgggtgcggtagctcacgcctgtaatcccagcactttgtggaggcgggtgcatcacctgaggtcaggagttcaagaccaggctggccaacctggtgaaaccccgtctctactaaaaataaaaaaaatagctgggcatggtggcgggtgcctgtaatcccacctactcaggaggctgaggcaggagaatcacttgaacccaggaggtggaggttacagtgagctgagatcacgccactgcactccagcctgggcaacagagtgagactttgtctcaaaaaaataaaaataaaaaagagataccattatacccattaatttgagaaaagaattttaagtttgatattatttaatgttaccaggagaccagcttggccaacatggttaaaccctgtccctactaaaaatataaaattagctgggcgtggtggcgggcacctgtaatcccagctacctgggaggctgaggcaggagaatcgcttgaacctgggaggcagagtttgcggtgagccattgcactccagcctgggcgacaagagcgaaactcagtctcaaagaaaaggtcaaatatacagagacagagaataaaagcggctaccaggggtagggtgatgaggaagagattgagagagatgtcaaaggatccagagtagcaaatatgtaaattgaacaaatttcaagatccaatgtgtgattccataaggaatatagttttttggttttgggggtttttttgagacagagtctcactctgtcacccaggctggactgcaatgaagcaatctcagcatttcaacctctgcctccagggttcaaggaatcctcctgcttcagcctcccaagtagctgggaccacaggtgtgtaccattatgcccagctaatttttgtatttttactagagacagggtttcaccatgttgcccaggctggtcttgaacttctgggctcaagcgagtctccgcccttggcctcccaaagtgctaggtttacaggcatgagcatttgcgcctagctgaggacgacaattagtaatttattttatcaggatttttgctaaatgtgcagagtatagttgctcttgccactgtgggaaaaatgggtaactatgtgagatgatggctacgttaattggtttcactatgataaatattttactatctatatatacatgtatctcataacattacgctgtacatcttaaatattcacaataaaattcattaaaaaaagaattaggataggcaattcacagatgaagaaactcaacgtatgtaaatatgctcaatatcattaacaatgagggaaaagacaagttaaaaacaatgagatgccggccaggcacggtggctcatgcctgtaatcccagcactttgggaggctgaggccagtggatcacgaggtcaggagttcgggaccagcctgaccaacatggtgaaaccctgtctctactaaaaatacaaaattagttgagtgtggtggcagatgcctgtaatcccagctactcgggaggctgaggcaggagaatcgcttgaatctgggaggcagaggttgcagtgagccgtgattgcgccactgcactccagcctgggcgacagagcaagactgtctgaaaaaaattaaaaaaaaaagagataccattatatccattaatttgagaaaagaattttaagcttgagatattatttaatattgccaggatatggaatgggaactctcatacacttctgtggaaagtataaattggtataaccgctttggacagcaattttataatatgtgaagtagaagatacattggctggatatggtggctcatgcccataatcctagcattttgggatgctgaggcaggaggattgcttgagcccagagttagagagctgctagagactagcagcctaggaaacatagcaagaccctgtctcaaaaaaaaattaaaaagatacatatatgtccctaaaacccagaaattccacgtccaaagaaactctcagctgggcatggtggctcacgcctgtaaccccagcactttgagaggccaaggcaggcagattgcttgaggtcagcagttcgagactagcctgggtaacatcaggaaatcttatctctgcaaaaaaatacaaaattagcttggcgtggtgacatgtgcctgtggtcccaggtgctcaggaggatagttggagcccaggaggtcgagactgcagtgatctgtgattgtgccactgcactctagcttgggcgacagattgagatactgtctcaaaaaaaaagaagctcttgcatatggaaacatgtgaagtaaaaccaaagatgtttatccatgttctttgtaatagtgaaactggtggggagcgggcggggcagggggcagggatttaatatccatcaagggggtctcaaatgtgaaacataaaccaaacatggaagagttatacaaggtaatattatacaattaaaatgaatgaatatggttgaatcttagaaacacagggtttaatgagctacaaaagaatatttataatttgacaccattaatataaattaaaataaacataaccaaaacaatactatgtacatagcaaaggtataaaaaccatgagtggttgttcagactgggaaggtgaactcagtaagtacattttcatctgcaattttttattatttaaattttatttattaatgtttttaagagacagggtcttgctctgttgcccaggctggagtgcagtggtataatcatagctcgccgaagctgcaacctcccagactcaaacaatcctctcacctcagccttccgagcagcttggactacatgtgtgcaccaccacacctggctagtttttaaaatttttgtagagatggagtcttgctatgttgtccaggctggtcttgaactcctgggctcaagcagtcctcccatctcagcctcccaacatgttgggattacagacgtgagccaccatgtctggcctcaatttttatttccttaaaaacaggtttgatacaaatatgacaaaaatatcaacatttgttcatttggatgattggtacccaggtgtttgttatattggccttttttcttatcagcatatttaaactttttcaaataaaggagtacttctaaatcactacaaaaatataaacacccccatcaaaaatggccaaatgatacaaaaagctaatttgttgctaaaaaagggtcttgatccagaccccaagagagggttcttggatctcatgcgggaaagaattcagggtgagttgtagaggacagtgagaaaagaccatttgttaaaagctactcttacagaattgggggttctcaggaaacaggaggaacgtgcttacttttaacctcttcttatataggagtcttgtctatgtaaaaggtaaactaaattatggttacgtgcaggtgggctgacagcatgacaaaatttagtactttgctgatttaaagaaggctatccttggcattttagtgcatcacttaaaaaaatatattgttatgtgatattgggacgtgtgtacattctgccattgcaggagtttgtccttgcaaaaaaatacaaaattagcttggcatggtggcatgtgcctgtggtcccagatgctcaggaggatagttggagcccaggaggtcgaggctgcagtgattcgaggcattttaaagctttctttctttctttttttttttttgagacggagtctctctctgtcaccaggttggagtgcagtggtgcaatctcagctcactgccacctctgcctcctgggttcaagcaattctcctgcctcagcctcctgagtagctgggactacaggcgcacgccaccatgcccagctaatttttgtatgtttggtagagacggtgttttactatgttggataggatggtctcgatctattgacctcttgatccgcccgcctaggcctcacaaagtgcttggattacaggcctgagccactgcgccctgcccattttaaagcgtttttaagctgtttcctcaactgtaaacatcttatgaccaccggccgggcgcccaccaccacacccggataatttttgtatttttaatagagttggggttttgccatgttagccaggctggtcacgagtagctgtgattatgggcgtgcgccacagtgtctggctaatttttgtatttttagtagcgacggagtttcatcatgttggccaggctgatgttgaactcctgacttcaggtgatccacccgcctcagcctcccaaagtgctgggattacagccgtactttgctagttttaaaatggatttgatttttaaacggtgtcaccctggctcccctatgctcctgtttccctaataaatttatagaggaagaaatacagatggctcaggaagagaggaaaatacatacaacctaactagacaccaggagaaggaaaatggaaacagcagtgagctgcctttttgcttattaagttgacccaaccaggccgggcgtggtggctcacgcctctaatcccagcattttggccaaggcgggtggatcacctgaagtcaggagttcaacaccagcctggccaacatggtgaaaccctgtctctactaaaaataccaaaaaaaaaaaatatatatatatatatattagctgtgcatggtggctcatgcctgtagtcccagctacctgggaggctgaggcaggagaattgcttgaaaccaggaggcggagattgcagtgagccgagttctgcactccagcctgggcaacagagtgagactccaccgaaaacaaacaaacaaaattgacccaaccaaaaaaaataataataactaatgtggagaaatgaacactgctatctactaaatggagtataaatgggtacaattttgcgaaagggtgttttggtaaaatatatgcagcacattcttaaactcactttcaatctgtctcaaatattggattggttaggattacattactctgaataagttttaccttgtaagagttaattaacagtaatttgacgcaggtagaagattgtacctttccatgttgaaggcgtggtgactggggttcacagtgacctcagaaccagaccccctttgaactgtggcccttttggccttcactctccagatcgcctcacagtttcgttcctgccccagccattacacctgcattcaagccggcaggatgaaggaaagggaaaagaaggggcaaagagtaacaccagctgtctcttaaggaagattcccggaagcttccatgtgatatgtctgccttcatctggtgtctagaacctaaatgtatggccctgcttagttagaagggagtctgagaaaggtagttttgattctggacagctaaactatcttgtttgtttttcttctgggtacaagaaggagagaaatgaccgggcacagtggctcacgcccataatcccagcactttgggacgctgagatgggtggatcacttgaggtcaggagttcgagaccagcctggccaacatggcaaaaccccacctctactaacaatacaaaaattagctgggtgtggcggcgggtgcctgtaatcctggcactttggaaggcagagacagtcggatcactcgaggtcaggagtttgcgaccagcctggccaacatggcaaaaccccatctctactaaaaatacaaaaattagctgggtgtggtggtgggcacctgtaatcccagctacttggaaggctgaggcaggagaatcgcttgaatctgggaggcagaggttgtagtgagtggagatagcaccactgcactccagcctgggtgacagagagagactctgtctcaaaaaaataattaaaaaaaaaaagtacgaaagaatggatattaggaaatagcagtatttgctgtgggtgtgtactttaattttggtctggtctttcacgagccatatatatagcacagaagtccctaacctttttagcaccagggatcggtttcctggaggacagtttttccacagaccagggtggggggatggtttcaggatgatccaagtacattacattacgtttattgtgcactgtacttctattattattacattgaaatatataatgaaataattatacgacccatcataatgtagaatcagtgggagccctgagcttgttttcctgcaactagacggtcccatctgggggtgatgggagacagtgacagatcatcaggtattagattctcataaacagcacgcaacctagatctctctcatgcgcggttcataatagggtttgcactcctatgagaatctatgccgccgacaggaggtggagctcaggcggtaatgctcgctcgcctgacactcacctcctgctgtgtggcccgtttcctaacaggccacagactggtaccggtctgttggtgttaaggccatcctgtccagatggccttaaccagccagggtgtcaacccccagctgttgtgaattttagttgctctcggatcacaacttcccctttctccagagaactgttcttggtctacagctgtctgtcaccttaccaagaaatgtcggggaggttacacctgttctaggggagaggaagacagccaatgacttaccaacagaaggtcaaaaagcccagctcttgactcaagggagacatccctggagtacaattcttattccaatttcctgcgtgatcagactagattccagctgaaaccacattcttcactccctccctgatatatatgattcattcctgctcccttccttcctattttctacacttgtctcacttcttgacatgttcctcttgagaacatactcttcataaattatgtacacaagaatccccatcttgggctctgcttctagagaacatgacccaagacaagtccgcagttactgggtagcaaggcaaaaaaagtaagtttcagtcctgtccaacgaccgtagtctaatgctaaaatttggtcagtcctttaggtaatgcctagtctctgtggtagattggatattgttcccaattcttcactccctccctgatatacattattcatttccaccccattgactttgaacttagctctaagactgactttggcccatggaatgttagtggatgtgatgtgagccaaggctaaaaatgtgcctgcgtggtttggtttggctcttgtaatcccatcttctgttatataaagagcatgtcacagtcactgccggtcctagaatgagaagacttgtggagtggacttgaatcccgctcacagccttgagccaagcccagctgattctagttgaagccagagccccacagctgaacctgcaacctatgagtagagaatcaacgcttgttgtaagtccttttatttcgatgtagttatgcaggagaagcatgactagtagagtcttttaaaaataaatactcagggccagacgcggtggctcatgcctgtaatcccagcactttgggaggccgaggcgggtggatcacgaggtcaggagatcgggaccatcctggctaacacggtgaaaccccgtctctactaaaaatacaaaaaattagctgggtgtggtggccagtgcctgtagtcccagctactcgggaggctgaggcaggagaatggtgtgaacccaggaggtggagcttgcagtgagccgagactgcgccactgcactccagcctgggcgacagagcgagactctgtctcaaataaataaataaacaaacaaatactcagatctttgggtttttatacttgtcccattttcagagggtgtctggatgaacaaggagaggtgggtttatgtgtctagctcctacttgctgacgtctgtcactgaggagatccatctttttctgtttgagctgggtctgatgacttagcctctcattggctttcgcttgccttgtggacacctctgagtcctggttctgccccctctgttcccgtccatgctgatcagtccactcagcaccctctgcggccccaggacagacctactgactctcagcatttgctctaccaaggatcataacaggaggccagtcgaggctgtaaccctgcttaaccattctgcacattactcttaactggattcaagcagggccattctacatggtggcctccttccagaatcccaaatatggaatagatcaaatgcctcctgcccttgaagcccagttgaattatcaaactacctctgcttcttcatgattcagtctagaacagagagactagggcccatgtattccatagtcattctctgctacctctccctcattttcttctccatcataccctcaggcctaggcctaggttttgaaagcacactatggaagaaatgctccaacctcagagtcttcatatgtcaaatgaaaactaaaggaatttagaaaacgattttcctcttgacaacatcttgctttggagcctattgatttgcagtaaaactccattgtgaatgtccaaagctgcaaaaaaaaaaattcctctttgcttatcccctgcaatatatcaaatcctccccaccaccttgatggaatggataagttgtgatagacatagagatatgcggcccagatctcccttcagggaagaacttgctgcctggctgcagagaatgtggtcagtccctccaaaggtagccagtgtgcaatgactgagtcgggtggaggcataaagacctccctctttggggtcaacatgggacactttaatgagcaattctcactcaaaaactccctgccgtgttggctgaagctttattaggcctgcatcacagtttaacttcttcctctccctagtttggcttctgcccccttcttttccataataagcgtgttttgtttgtttgtttgcctgcttgcttgctttttgagacaaggtcttgttctgtcacccaggctggaatgcagtggcatgatcacggctcattgcaaccttgacctcctgggctcaagtgatcctctcacagagttggaattacaggtgtgagccactacacctagtctttaaatctttaaagatttgaagtatggaattggaaaagaggagacaaaattatctagattttcaggggatatcaacatatacttgtaaactccaaggaaaccttgtggtggatagaaaatactcatttccaccctctccagaaacctcactaaaaaggtggtaaagagttctcttaaagatataaaagacaaagataaaggatatgaacaaattgtacatataaaaaatgttgagctgagtgtagtggctcacacctgtaatcccagtactttgggaggccaaggcacatggattgcttgagcccaggagttcaagaccagcctcatcaacataacaagaccctgtctctacaaaaaattttttaaaaaatagctgggcatggtgtcacatacctataatcccagctgctcaggaggttgaggcaagagaattgcttgagcctgggaggtcgaggctacagtgggttgtgttggtgccattgcaccccagccctggtgacagaacaagatcctgtctcaaaaaaaaaaatattaaatgaaaaaagcaagatggagaacactgtacctagcatgctatcattagtataaacaaaagacaggtagagtctggataactgaggggagcaggaggtccccaggaaggcctgttttccaaggaaagaggaggaacagagaggacagtgagggtgagggcggctgctgtctcctaaatctgtcacctccccttctctgctttggcagccattatgtccatgggtctctggcttgtcttgtgcaatacttccttgtgttaaactccaagatatcaatgggctgatgagagttccagcgtgagctacgtgactggatgggtgcttggaataagaatcccatgccccagagagcaagaccagcaagacaatactgactaagccactttcccctgtaagccaccctggacccacttctcagtcctaaggactaatgacataaactggatgatggtcacataaaaatcttggtgagatgctggaagtctaaagtggtccctttgggatcataatgtaagaaagtggcttcaaggcatatttcagcatagagtaaccttggcattggaagcactttgcaaaaacataagaggccatgctaactcttttcatacaacagaggcctggcaggtgacatttccagagggagaatggaagattctgagagcactgcacaagagtctcccttagacacttctagaacatataggaggctgtggtagaagggaactgaaagttcaaagtgttgatcatgtgcactgactaagcctttgtatttaaaatcaagatgacatcataacggcctgattttctttctttctttctttctttttttttttgagacggagtctcgctctgtggcccagactggagtgtagtggcgcaacctcggctcactgcaacctctgcctcatgggttcaagcggttctcctgcctccccaggtagctgggattacaggcataaggcaccgcacctggccaacctgattttcttaaaaataaatctgggtttagattattggtagaaacattaagtgatgttgtgtcttctcagtgcaacacaccagtcaattttcacgttgatggtgatgctaagtgtaatctgatggtcaacgtggtgaccttcagctctctctgtggtaaagatacgttttcccttttgcgattactaaacagcctgtagggtgatacattcaaaccttatgaatatcatttttcccaaccccctttatcctaatagttttacattccattgatgatgcctgcctgaatcaattattaatagactggtcataaaatgatgatttttccatttctatcattccatctacattcacaatttggcattcttttatgaagaagagctttcttttcttttttttttttgagatggagtctcactttcttgcccagtctggagtgcagtgatgccatcttggttcactgcaacctctgacttccaagttcaagcaattctcctgcctcagcctcccaagtggctgtgattacagatgggcatcaggacgcctggctaatttttgtatttttagtagagatgggtttttgccatgttggccaggctggtcttgaactcctgacctcaagtgatccacccacctcagcctcccaaagtgctgggattacgggtgtgagccacctcacctggccctcttttctaccccctttaaaatttttggtgttggccaggtgcagtggctcacgcctgtaatcccaacattttgggaggctgaggtgggaggattgcttgagcccataagttcgagaccagcctgggcaacatagcaggatcttgtctctattaagaaaaataataataaaataaaataccattgttggttgttttatttatttattgtggtggttgttgttttgagacagagtctctctctgttacccaggttgaagtacagtgacatgatcatagctcactgtaacctcgaactcttgggctcaactgatactcctgctttggcctcccaaagtgctgcgattacaggtgtgagcacaggccaaaatttttggtgttaatatcaatagagacacatggattccttttgattcaatatataataatccattcctgcattattcatatgaggctgagattgtcccagattttgacatgagggcctccataaaaatgtagattgcaagccaccttctccctctcctccagtggggcctgggattctgcatatataactaccactaaactaaaatctgaaacacccactaaatctgaaaagttgaggaaaagcccttgccaaggaccagctgaggagtttatgttaagagtggtttcacacccaccaggcaatacagctagaacttgacaagggcatcctctgaggcaaagaaggccagaatgccagcaaacgaagatgcatcttctggaggtggaagggggtgaggaagaaatggagaggtcagggctggaaaggagatgcttatggtttttttcctgccttgggaagactatagcagacaagatacctattaattcttgcaacattacagcaatggtttttctgagtaataggaacagtttgcttctatccccaaagatggagagctctttgctatttggaaccaagtgttgatatagtcaggaaaagacctggatcaagggagtgtataaagcacacaagtgcacactgtcactcttgctgaacactcctggtgaaatgtagaaaagacatgaaagagggaaagtaatacatctacagcagcatcaggaaactgaaaagccaaaaggccaggcatttgatgaaagtcctggacaatagagagcaggaggaaatgtgggatcaaaaaagcagaactgggccaggcttgttggctcacacctgtaatcctaacaatttgggaggctgaggcagaaggattgattgaggccagaagtttaagaccagcctgggcaacatagtgagaccctgtctctaccaaaaaataatataaaataaaaattttttaaaagtggggaattgagtccatgcatttgggcctacgtcctctccaaacctcactaaaataacagttaaaaaataaaaaggacaaaactcacaaggacaaaaagaacagacattgaaacaagattgagctagtgatgtcgagaataaatatttcagatgttctaggccaggcatggtggctcaggcctgtaatctcagtattttgggaggctgaggcaggtggattgcttgagcttgggagtttgagaccagcctggacaacatggtgaaaccccatctctaccaaaaaaaaaaaaaaaattacaaaaatgagccaggcgtggtggcacacacctgtggtcccagctactcaggaggctgagatgggatgatagcttgtgcctgagaggtcaaggctgcagtgagccatgaacacgctgctgcactccagcctgggcaacagagtgagaccctgtctcaaaaaaccaaacaaaacacatatttcagacattctcacctgacacaggtattaaagaggaaatgattccacacttgggaaaatggcaaaattatgattgcctaattcctgagatcttaggggaacactttttcaaaccctgtttcaataaaagcagaacctgcatcctgggaatttaccctcatgggacacaccaggggaatgaaattccattgccacaatgtatgtaatcaatccataatgattgaagaaacagacagttttatggttctataaagttacagtttaactttagagactaataggttctatgtttttatagcctggtatagtttaactttagagactaataggttctatgtttttatagcctggttgtgtggttaaatacaatgattttattgccctgtggaaaattaatcagtcttgaattttacccagcaaattgtccttggaattcctttaactctagctctgttcgtttgtgcgagcacacgagggtacacacacacacacacacacacacacacacacacacacacacacacagagtttttctttttttttttttgagacggagtctcgctctgtcgcccaggctggagtgcactggcgcaatctcggctcactgcaagctccgcctcccgggttcacgccattctcctgcctcagcctcccgagtagctgggactacaggcgcccgccaccacgtccggctaattttttgtatttttagtaaagatggggtttcaccgtgttagccaggatggtttcgatctgacctcgtgatctgcccgcctcggcctcccaaagtgctgagattacaggcttgagccaccatgcccggcctctttgacatttcagtgtgtgagtccatcagagcataactgttattatctttcttctctttttttatctttgagatggagtcctgctctgtcgcccaggctggagtgcagtggtgcaatctcggctcactgcaacctctgcctcccagattcaaacgattctcccgcctcagccttccgagtacctgggattacaggtgcatgccaccatgccaagctgatttttgtatttttagtagagacaaggtttcaccatgttggccaggttggtctcaaactcctgacctcaagtgatctgccctcctcagcctcccaaagtgctgggattacaggtgtgagccaccataccctgccataactgttattatcttgaaagcatgtgtttttatgggtactgggacatctgaactctctgacggaggagtgcgtcctcgtaggtgtctttatggtctttcctcaactataaacatctgtaatcatgggtagtgactggcaaggaatgtgccctgttagtctccagatggagctgaacttttaatttggctcttctaggctcctgcttccctaacacaaagtcacaagtttctgcattgaaaggtcttaccaggaacctagaacaatgaattaattaaaaaatatccacacaggctgggcacagtggctcacgcctgtaatctcagcactttgggaggcttaggtgggaggattccttgaggccaggagtttgagaccaggctaggcaacatagagagaccccatctctacaaaaaatttaaaacattagctaggcattgtggcatgtacctgtagtcctagctacttgggaggtttaggcaggaggactgatttagcccaggagtttgaggctgcagtgagctatgattgtgccattgcattccagcctggcgacagagtgtgactctgtctcaaaatacatacacacacacacacacacacacacacatacgcacacacagaaattagtatgaattcatatttatgtgtgtgtgtgtgcatatacacacacccacagatgagtaaatacagaaataactttagaaataaatgtgtgtctaaatggattagtatacacatacatattattctaaccctctgctaagagatccaagagcagtgacacccaataaaacaagcacatccagtgcccagatcttggtttctaaaccaagaatggtttctaaataccattctctgattttaaaaaaccagggcttcttgaaaaaatgactgaagctatttcaaggcaaggaaaatgcaagatgagcccagagcacctgatagaccagaaggcaaggaagtactcaagaaaaaaaaaaagtcagagggataccacagccaactctgaggagtttccaatggccaaagccagaccaatttgggaaccaaaataaataatgtggtattggattgtaacccaaagtgtaaataagtatagatgaggccatatttacagagagaaaatgattgaaaaataaatgacagaaaagggacaaatttccttatagaagaatttcaaataacataagtagctatgctctccaccttgcaaaaagaagtttacttcttctccccaacccctttgagggtaggctggactttgtggctcacttccaaataacagaatatggaagtgggaaaaatggtaactgtgtgatggagaaacctggaaataccaccttaaccaagtgatcatggttaacattatcagtaataagagtatattacttgtgctattcttctcgaaatcccataagcccagtctagtcctgagaaacataccagacaaatgcaaactgagaaacattctacaaaatgctggatagtactcctcaaaaccgtcagggctatgaaaacaaaacaagactgggaaactatcacagaccagaggagactaaagggacaggatgaataaatgcaatatggtgtcctggattggatcttggaacagaaaaggggcatgagtagaaaaactgatgaaatttgaatgaggtctggagtttagtgaatagtaacataccaatattggttttttaattttcacaaatataccatggtaatctcatatgttaacattagggaaaactaggtgaggggtatataggaattctctatattatctttgcaacttctctgtaattttttttttttttttttttaccaaatacgtatttttttattatgtcacagcaagaaagagcataatctgatttatgttataaattccaactaaagaagtgattcattcaatctttatacatatgacaaatatttaatgagtatccactctgtaccagatagtgttctgggcactgtggacacagagatgagtaagacagttaaagcccttgccctcacggagctttcattctaggggattctgggaaggcaaaaagaaagcaaacagtccagttaagataccactgcagagtccacatgatggatcataatggtttctttttttttttttttttaattgatcattcttgggtgtttctcacagagggggatttggcagggtcacaggacaatagcggagggaaggtcagcagataaacaagtgaacaaaggtctctggttttcctaggcagagtgtgtgtgtccctgggtacttgagattagggaatggtgatgactcttaaccagcatgctgccttcaagcatctgtttaacaaagcacatcttgcaccgcccttaatccatttaaccctgagtggacacagcacatgtttcagagagcacggggttgggggtaaggtcatagatcaacaggatcccaaggcagaagaatttttcctagtacagaacaaaatgaaaagtctcccatgtctacttctttctacacagacacggcaaccatccgatttctcaatcttttccccacctttcccccttttctattccacaaaaccgccattgtcatcatggcccgttctcaatgagctgttgggtacacctcccagacggggtggtggccgggcagagggggtcctcacttcccagtaggggcggctgggcagaggcgcccctcacctcccggacggggcggctggccgggcggggggctgacccccccacctccctcccggactgagcagctggccgcgcggggggctgaccccccacctccctcccggacggggcggctggccgggcggggggctgacccccccacctccctcccggactgagcagctggccgcgcggggggctgaccccccccacctccctcccggacggggcgtctcgcctggcggggggctgactcccccacctccctcccggacggggcggctggccgggcagaggggctcctcacttcccagtaggggcggccgggcagaggcgcccctcacctcccggacggggtggctggccggggcggctggccgggcggggggctgaccccccacctcccttccggacggggtggctgccgggcggagacgctcctcacttcccagacagggtggcagccaggcggagggtctcctcacttctcagacggggcggccgggcagagacgctcctcacctcccagacggggcggcggggcagaggcgctccccacatctcagacgatgggcggccgggcagagacgctcctcacttcccagatgggatggcggccgggaagaggcgctcctcacttcctatgtgggatggcggccgggcagagacgctcctcactttccagactgggcagccaggcagaggggctcctcacatcccagacgatgggcggccaggcagatacgcacctcacttcccagatggggtagcggccgggcagaggctgcaatctcggcactttggggggccaaggcaggcggctgggaggtggaggttgtagctgagatcacgccactgcactccagcctggctaatttaaaaaattttttttgtagagacgaggtttcaccatgttgatcagactggtctgggactcctgggcttaagggatcctcctgcagcactcaatttttttttttaaatagaggcagtatctcactctgtcacccaggctggagtgcagtggtgccatcatagctcactgcagcctccatctcctggactcacgtgatcctcctgcctcagcttcccaactaggtgggactacaggcatgtgctaccacacctggcgaattttttttttttgtagagacagagtctcactatgttgcccaggctagtcttgaattcctgggctcaagtgatcctcccatcttggcctcccaaagtgctggggttataggtgtgaaccaccatgcctggctgtaaatcttaaattattccaaaataaaatgtttcttcacataaacagttagtggcacaacacataaaatttcagaatattagaaacaatggattgtatgagcttctagagaagaaaaaaagtaggtcacataaaaacaatcaggaaacacaatggcatcagactgcccatcaggaaccctgaagcaatccccccacaacctgggagaaattacagtcacctacttgcctcagccttgaacagggcaacctgtcactgcttaggtcacatactgcttagccccagaagtcaccctggacttctacattagggcagccctggctgtgaactatgtttgcataatgataataacacaaatgctaaataccagcataataatatatattataactattatttgctgggagtgtgattgtaggagtaaaattacgtcagtatgtgaatgtgtccacgtgatagggaacaagatagtgcaaattaagtttatatggtaaggagtcagataatatttaagaataaaaaatcaaaaaataagacttccatatctggtagaaaagatgaggtaattgaatcaattttataatgaaactatttaaaaatgcttaagtatctgtatctatttgtctctagttctccatttatctatcaaactgtatctatctatttatatccctaaaaacattgagctaaaaacgtaaggggaaatactgaggtcaaatttttctgttttgagcgtaatatcagattaccaaagctgcttctgtcttgctaatactgcatagttgggcttttgttcagtggtgttgggagacagggcaaatggatgaaagtagagacttaggctgggcacggtggctcacacctgcaatcccagcactttgggaggccaaggcgggtggatcacctgaggtcaggagtttgagaccagcctggccaacatggtgaaaccccgtctctactaaaaatagaaaaattagctgggtgtggtgatggtcgcctataatcccagctacttgggaggctgaggcaggaaaattgcttgaactcaggaggtggaggttgcagtgagcccagatggagcaacaggagcgaaactctgtctcaaaaaaaaaaaaaaaatttttagaggcttagggcttgtttaaggtgggtagactcaaagaccctgttcaaatcaagctgggaccccccacaaaggcctatactctcaggataaaggtaaatcagaaccaaacttgttcccttccactaccccaggggagtttggagaaggccgtcttggtcctgaacaaagagaaaaaaagataggagaaacaaacaaacaaaaaatctgtctttgagaatttgtggctactgatcagtcctgacttgtacctggaacagtctgtgctacctggaggggacagctgtgaacttagtttgaggaagtcattgagtgatgaaacagaagcaaaatagaaggtctctctggaacttgatatatccattctgggccttagggagcacctaaaatacattttcaagggtgatgaccagcaggaggtcaaagataataaacaagaaaataagataacatgagaaagaaacagcagaaacaaccaactctagaaacagattcacacaggcttaggatattagaattgtcagacagattataaaaagtacacttaaaatatttaaagaaataaatgaaaagcctgaaaaatatctataagagatagcaaatgctaaaagttgaccaacaagttttagaaaaatatcaattaaagtttctagtaaataaaacctagaataactgaagttattctaataagttattctagtaaattttagaatttactagaataactactaaatattatatttactagtaatataatagtactattataatagtaatatttatagtgttatattagtatattcaacatcatattaaatataatatatattatatttactagtaatatagtattatatttactagaataactaataattttctagtaaatattagtttactagaataactgaagttattcagttattagagtttctagtaaataaaaactggaataactgaagtttaaagctcaatgaatgctgggtgtggttcatgcctgtaatcccagtgctttgggaggccaaggtgagaggaacccttgaggtcaggagtttgagaccagcctgggcaataaagcgagactccatctcaaaacaaaacaaaaaattagccaggtgtggtagcacatgcctgtattcttagctacttgggaggctgaggttggaggattgtttcagcccaggagttggaggctgcagtgagccctgattgtgccaatggacttcagcttgggcgacagagcgagactcggtctctaaaaaataagaaatagaattcagaaacaaatactttgtcatctatagaccataactaaatgaaagtataagaggtgtgtttctggtagaaagaaaatgactctaatatagaagaccagagatgcagaaagaaataatgagtaacaaaatggaacatatgtgggtaaatataagtgtaaaatgtgggtaaatattaatgtacattggtcatttaaaatgatagtcatgatgttttgttggataaaaaccatatgtaggcagggtgtggtggctcatgcctgtaatcccagcactttgggaggctgaggcgggcggatcatgaggtcaggagatcaagaccatcctggccaacatggtgaaaccctgtctctactaaaaaaaatacaaaagtttgctgggcgtggtggtgtgtgtctgtaatcccagctactcgggaggctgaggcaggagaattgcttgaaccatgcagttggagattgcagcagtgaactgagatcacgccactgcacttcagcctggtgacagagcaaaactcagtctcaaaaaaaaaacaacaaaaaactacatgcatatgtgcaacaatggccatatgtcaggtgtgtgtaaaaggacttaaaagtgttctaaggtccttgcattgcccaggaggagggttaatggatcaattcacattagactggatgaggcaatgataaacattatgattttgagggtcactgctaaattactagaaaaagattgtttaacattcaaattagcagaaacaaaaaatggaataatgaactatattaatcagtcagaaggaaagaaaggagaggaataggtgttagaaaagctgagacaggccgagcacagtgactcacacctgtaatcccagcactttgggaggctgaggcaggaagatcacttgaggccaggagtttgagacctacctgggcaacatagcgagacacggtctctatatattaaaaaagaaaaagaagaactgagacaaatataagactcataattcacaatgataaaatgtcattttggctgggtgtagtggctcacacctgtaatcccagcattttgggaggcaggtggatcacttgaggccaggagttcaaaaccagcctggcccacatggcgaaaccctgtctctgctaaaaatatgaaagttagccgggtgtggtagaacatactcgtaagctcagctactcaggaggctgaggcacaagaattgtttgaacccaggaggcagaggttgcactctgtgagccgagatcacaccactgcactccagcctaggtgacagtgaaagactccgtctcagaaaaaaggcaattttccaggaagatgtaataattctaaatttgtaggcacctactaatatcgtcctcaaaataaaatgctaaatcaacagaactagaagtagaaatagatgtgtctatgatcatggtgagacattttaacatatttcttgcagaaactgacaaaatagatctacaggcttgttgtttgccattctttctttctgcctattcttttcttcctttctcttttctactctgaaatacagggagctacatgtcctagactttggttcagccgataggggcattctcagaaaactagcaggtagaggggggaaagccattttctctctactttgagtggtgtgtgtgtgttttctccacagccccagcttccacctggaaaaaattaattaactagaaaacaagcatacaaaagagaggattaatgaagccacacattggttctctgaaaagactaatgaaattgataaaccttttgtgatcctgatcaagaaaaaagagaacagtctcaggaatataacagaggcatcacttctgatcctataaattctaaaaactaaaaagaggatattatggacacattttatatcaatcaatttaaaaattaaggtggaaatcctagggaaaatacaaaaatgatacaagaaaaaatagaaaacttgaaaaactcctctaacttttaaagtacctgaattcataatttaaaacttctcttcaaagaaaatttaaggctcacatggctttactggcaagtcatattaacatttaaggaataaataatttcagtcttacacagactccttcgggtaatagagaaaaaagcatttccttaatcactacagtaatggagcgtgatattggctcaaggtgggaggactcgttctaccagataccaagacttactaaaaagttagaacctgggtgtggtggctcatgtatgtaattgcagctctttgggaggccaaggaggaagaatcgctcaagcccaggaatttgaggccagcctggacaaaacagcgaaaccctatctctacgaaaaagaaaaaaaaaaaaaaccacaaaaattagctgggcaaggtggtgagtgcctgtggtcccagtgattaggaaggttgaggtgggaggatcacgtgagcctgggaggtggaggctgcagtgagtggtgatcacgccactgcactccagcctgggtgacagagcgacaccctgtcttaaaaaaataatagtaataaaataaatttttaaaagttagtactcaagacagtatggtattggtgttaagatagaaaactagaccatatttaaacaatttatgacaaagatggctctgcagagcagcagggaaaggagagccttttcggttaaatggtgctgaaacagaaaagttggtatagagaagtggttagacaggtgatggaaatctgaaagatcaaaaagaagatgaggtaacccagagaaaagtaactccagtctcttctagcatttagggaacaaatgtaggggaggtggtgccaccagaatctaagagtgcagagaaaggagctgggcccagggaggaggaacatgttgccagagcttcaactttgaaggaggggcctccacttcaaagaggaagaaggaaagactgagaagaaaggaaaaagaagaaagacttctttctgctgccttctgatctcctgcccatgtatctcttcttggagagcctaatgggaaacgatcaacaaggaaggctgagaaacataattcacaggccccagtcccagtgttcacaagcagaaaatggaaaggtaaattatcagcactagtatccatatggagaaatgaaaattgacttctttctcataccatacacactataacatctaaatattaagggcaaacaatgaaatgttcagagaaaaaaatgtaggaaaaatgtttcactgtcaaagagtagacaatttttttttttttttagatggagtctctctctgtcacccaggttagagtacagtggcacgatcttggctcactgcaacctctgcctcccgggttcaagcgattctcctgcctcagtctcccgagtagcagggattacagaggtgcaccaccacacctggctaaattttgtatttttagtagagacggggtttcgccatgttggacaggctggtctcgaattcctgacctcaagtgatctgcctgcctaggcctcccaaagtgctgggattacacgtgtgagccacggtgcctggcctgacaaatatttcttaaacaggtcacaaaaaccactaactataaaggaaacaataaattcaaggacataaaaattaagaatttttttttttgagtttggctctttcccccaggctggagtgcaatggcatgatcttggctcaccgcaacctccacctcccaggttcaagcaattctcccgcctcagcctcccgaatagctgggattataggcatgcgccaccacgcccagctaattttgtatttttagtagagacgggctttctccacgttggtcagtctggtctcgaattcccgacctcagcctcaggtgatctgcccacctcgacctcccaatgtgctaggttacaggtgtgagccaccgtgcccggcctttttttttttttttttttttaagagaaaggttctcatgttgcccaggctgatcttgagctcctgggctcaagcaatccgcctgcctcagcctctcaaagtgctaggattacggtgtaagccactgcacctggccctgaaaattaaaaacttatgtccaccagaagatgacattgaatgaagaggtaagccagagagtggaagatatttgccatatatgtgtctgagaaaggacttgtatccagaatacctactcatttttctattgagttgtttgcttttgtctaatcgatttgttaatttattacttatctatttattttatttttatttttattttttgacatggagtctcgctctgtcgcccaggctggagtgcagtggtgcgatctcggttcactgcaacatctgtctcccgagttcaaacgattctcccgcctcagcctcccgagtacctgagattataggcgcatgccaccatgccaagctgatttttgtatttttagtagagacagggtttcaccatgttggccaggctggtcttgaactcctgacctcaagtgatccacccacctcagcctcccaaagtgctgggattacagacataagccactgcacccagccaatttgttaatgtatttaaaagtcaagaattggcactataggccaggcgtgggtgacaagagcaaaactctgtctcaaaaaaaaaaaaattggcactataagcatgttccttggaactatggatgtaaatgcaaggagaaataattttagcactcaccttgggtgggattgggaaatggagtttttcttttcttccttcccctccccttccctcccatccttgtcccttccttccttcctttctttttctttctaataggctcctgctctattgtccaggctagaatgcagtggcatgaccagggcttactgcagccccagcctcctgggctcaaggaatcctcctgcctcagcctgctgaatagctgggaccacaggtgggtgccaccatgcctggctaatttgtcattcttttgtagagacagcatctcactttgttgcccagacgggttgcttttcagtttgagcttcacagcactattttactttttaaaccattttcatttgttgctttggtaagaattaacaattagaaatcaattttaaaattattgaaaaaataaagaaaaattggcagaatcagattaatggaacacaagaccagagagaatcaaaacataccagttagaagtttaggatcaagtaaaaagcagggcttcccaatgaagttaaccgataatcccagcactttgggaggccaaggcaggcagatcactcgaggtcaggagttcgagaccagcctgaccaacatggtgaaaccctgtctctattaaaaaaaaaatacaaaaattagccagtcatggtggcatgtgcctgtaatcttagctactcaggaagctgaggcaggagaatggcttgaacccgggaggaggaggtttcagtgagccgagatcgcaccactgcactccagcctgggtgacagagcaagcgagactccatctccaaaaaaaagagaagttaaccaatatttaaacaacagggaattgttacatgcatagaagaacagatcaatggagcaaactgcataatcaagaaacagacccacagaaatgtagaatttagctttaatgaatgcagcatttccaactgttgggaagaagagagtactcaatatatggtttggggacaacaggttttatatattggaaaagaattaagttaggtttctacctcataccatcaataaaaataaattctaggcgaaatatagatctaaaatgaaaatatcaaaaattctaaaagcaaatatgttggaggattaaaaattaaaattcagagggaggaaagttttcataagtgagacacgaaaggttgagatgaatatggcagctgttcaatacttacaggctttttcttcttccattcttccatgacaaaactcttctgtcttgtgtggagcagcttgagtagtttgaaatgcctcatccagacacaggaatggatatacgatacacatcagtcagagtgcccaacctggttcaaagactcttctggaattcctacacccagtctgtcatgacagtctctctcccttcctttgaaatcatgaactataagaatatgggccatatttccaacaaggtgaagggaacttcaacagaaaagaagcccagagaactgagagattcagagagaaatagttctgtttttctttttttctttttttttgagatggagtcttgctctgtcgccaggctggagtgcagtggcacgatcttggctcactgcaacctctgcctcccgggttcaagtgattctcctgcctcagcctcctgagtagctgggactacaggcatccgccaccacaccagctaatttttgtatttttagtagagacgaggtttcaccatgttggccaggatggtcttgatctcctgacctcgtgatccacccacctcggcctcccaaagtgttgggattacaggtgtgagccaccgcacccagccctgtttttcatatttatttatttatttatttagagacagtcttgctctgttgcccaggctgcagtgcagtggccaatcatagttcactgtagcctcaaactcccgggcttaagcgatcttcctcccaagttgctgggactatagacaagacccaccatgcccagataattttttttttttttttgtagagacagtgtctcactctgttgctcaggctggtctcaaactcctgacctcaaatgatcctcctgcctcggcctcccaaagtgctgtgattacaggtgtgagccaccacacccagtgagaaatagctctaatgatatggttggaattatgattctggttgtggcttaatactaaataactccagaattctcaattttgttaccaaaaattgtctttttcttcgaatcagattgagttgggtttccatcaccttcagcccaaagaaccacatctgataaatccaaaaatgatgctggttagcttgtcaatttagaccacataaaattacagccttctcaacgtgagaaatagcaataaacagagtcaaaggtatgagatggagtggaagaaattacagcaaacaatggacaaaagatcaatgtctgggccaggcatactggctcacacctataatgttagcactttgggaggccaaggtgggaagatcacttgaacccaggagtctgagaccagcctgggcaacacagggagaccccatatctataaaaatttaaaaatttaaaaatgatggtgtgtgctgtaattcccactactcaagaagctgaggcaggaggattgcttgagcctgggagatggagactgcagtgagctgtgttcatgtcactgcactccagcctgggcaacactccagcctgggcaatcgagcaagaccctgtgtcaaaaaaagaaaaggaaaaagaaaaatcagtgtccagaatatatagagtacctccaactcagtagggagaaaataagatgactcaaaggaaagacgagaaaacaaaaagggtattgtggctgtcaaagctctttcctttaggaatgataaagcttaactcttacccttttaaagttaaaaaacaaacaaaaaaaggtggtggggagtggatttgttggttccataattgaatgagaacccaagggagcagtatgcttcagaaacagcaggatccttgttcttggacactgctcacagctattgcttgctctctcttcctctcttggttctaattctttcctttttatgagtaggctttattgtcacccagagtctctccacatggcagtaatgtattttccagcagcttcagacttgccatcattgccgtctatcagaactgtttgggttgtgagtgttacaaaattcattgtaaattagcttaaacaaacaaaataagagaacttactagcctgtataatcaaagaggtgtaatctaggatagggttggcttgtaggggagcttaagctaagagctccagcaatgtcaaccacttgggcttatttcactccctccattaggagcctgcctgctgctgtgtttgttggcttcattctcagaacagtccctcatgctaccttccagcggccctaggttcttctcatccttgatgctcttagtccagggaaaaagagtttttctctctcttaacaatcccatatttcaatggctctcattgggacgcagggctatgccaaacagtctctgtggtcacgggaacatgactaatcagatgcgggttacatgcctaactatgggctcaaagagaattcacctccactcaaagtagaggaactgagaatgagaggaaggtagctccctcccctttcctgcacaatgggtgtagtgttatcaggggtgaaatacatgttagagagtaaaattaacatacacctaccacaattttcttacatgtagctcataaccttagaaagagacatacctgcttcttcccagagtccatatcaatgctccagaaggctgtagctatgttggggtcatgtgtcttcctctgggtcaagccatcattgtgtcctactgaagggctgtctttggctgggcatcttagaagcagaacctgagacagcaaattcactgcccctgattaatggtgggagcactctcaggaaaaacctataatggagggagggatggatagggcaggggaaggagttaggtgaagatgagtccaactgaagtctagcttcagccggatccctaggagagctctgaagcatcaattgcccttatccttgtcccccattgaggtaaagagggctgacttttgtacccctcatgtttggatatggaatgtccccttgagggataatctttcaagcaaagtgaccctgtcctgctgagggcaattttctgataaaaggtgcagttgtgagcctctagcacttaggggaactgggggctgcgtgctagggtgagtaaaagggatctggctgggcctccaactgtgcctaccacaatgaactagcgagattgatcttctggggacatttgtcagtcttgtgacagaggacgtggttctttttgttttattgtatatatttaagatgtgcaacatgatattttgacatacatgtagatcaggggtgtctgattttttggctttcctgggccacattggaagaagaattgtcttgggccaaccataaaatatgctaacactaatgatagctgataagcaaaaaaaaaaaatcgcaaaaaagctcatgatgttttaagaaagtctatgaatttttgttgggctgcattcaaagctgttctgggtcacatgcagcctgcgggccgcgggttggacaagcttgctgtagacagtgaaatggttactatagtcaaggaaagtaatatatttatcacctcacataattacccattttttctgtgtgtggcaaaagcaactaaaatctattcttttagcaaaaaatctcaactacaatgcattattactaactgtaaatctcatgctgtttgtcaggtctctggactacttagtcctacatacctactctttgtattctttgacctacgtctccctatttcctcctcctcacccccataaccactgttttactgttttattctctatgcattcaactttttccccccagacagggtctctctctgttgcccaggctggagtacagtgatacaatcaaggctcactgcagccttgacctcctgggctcaagtggtcctcccaccccagtctcctgagtagatgggactataggcatgcgtggccacatccagttaattttttaattttttcgtagagatcaagtttcaccatgttgcctgggctggtctcgagctgctagactcaagtgagccttctgctgcagcctcccaaagcactgggattacaggtgtgagccaccaccctggccttgcctttttttttttttttttttttaagatcctacatataagtgagatcatgcagtatttttctttctgtatctggtttattttacttagcataatgtcttccaggttcaaccatgctattgcaaatggcaggatctcctttttttatttttattttttttgtaaagatggggtttgctatgttgcctaagctaatctctaactcctgggatcaagcattcctcccgccttggcctcccgaagtgttgggatcacactgcaccctgctgcatttcgcttctttaactgcctgctattcacacgtgtgcctaccaatttcaaaaatgctaaaaagtccccatttaagataacatagttagttcacaattgaagaaaagctctcccacttcttgcaataaacactgtcattgctctgcccatacccttgttcttgccactttagtgcattctgggctgatttccagctgccagtatgtgcatttctttgccttaaggctttctctgactgttccctactttgccacctgcacagcaggccagaagtacgaagaatgaatgtttctccctccttgggagctactcttaaccaatgactgatgggagttgacgtataaataccgcagccccctcactccttgtagtgggataacactgtggagcgtgttctatgcaggctcccagagttccccatgagattgtgctccaattgtacacagtggtaactggcttgataatgcgccctatattagttgtcttactttccccctctcccaccagtgttttcccttacctcccaaataaactccttgcaatggattccttgtctcagaatatgcttctggggacacataaacaaaaacctcccctccccaaactgaaatagctcaagtcaggccatgtctgctgtgggagggaatgtgtatgtgtgagggggtggcttccatcacttgtgtgttagctgcattctttttatttttttaaaacacatttattttaaaattttacataatctttgggtaattcagaattagcttaggcaggtttcagaagtttctgagactggtgtctcaactttaaagcaatagcatactctagtttcttttcagatcgtcttaatctttcatcttttactaaaaataaagattgaaatacaccaataggctgggcgccgtggctcatgcctgtaatctcaatactttgggaggccgaggcaggtggatcacctgagatcaggagttcaagacaaccctggccaacatggctgaagcccgtctctactaaaaatacaaaaattagtcggggtggtggcgggcatctgtaatcccagctactcaggaggctgaaggaggagaatcacttgaacctgggaggcagaggttgcagtgagcggagattgcagcactgtactccagcctgggcgacagagtgagaaaagaaagaaggaagaaaggaaggaaggaaggagagagagagagagaaaggaaagaaagaatgaaaggaaggagagaaagagagataaagggaaggagagagagaaagaaagagcgaggaagggaaggaaggaaggaaagaaagaaagagagaaaacaccaatagaaatagcttatttgatttgcggaaggattagagaggaccccatgatctagtatgcatggatggctattgaagaagacagaaccccatagacaaaggaagcattaagatgtaatttttaggctgagcgcggtggctcacgcttgtaatcccagcactttgggaggctgagtcaggcggatcacttgaggtcaggagttcgagaccagcctggccaacatggcgaaaccctatctctactaaaaatacaaaattagccgggcgtggtggtgcgtgcctgtaatcccagctactcaggaggcctaggtaggagaatcccctgagcctgggaggtggaagttgcagtgagccaagattgcgctactgcactccagcctgggtgacagagagagactccgtctcaaaaaaaaaaaaaaaagatgttaattttaaattgtctgccacaaatattaaacagctcaccagaccaacaataacatctatatcttatttgtattttaccaaagttcccacatacagatagcatagaagttccacagctaaaagttttatacacttcagaatcatatttaaattaatctgatctcttgtattaataataaaaattaagaactagattccactcagcgtggtctcagtctccacaccaacatgtatttactactgacagaatgcctccttcctctgcactcagtgatcatgatttatgatctgatgtgtcaaatcagaacataaagcaaaccagggattcacgggcccagagaagggtaaagaactcgtcccatccagcaggtaagcagcccaagtgctctgcccattcccaagcagaatcagagctgagcagcaggcagtgaggaggagagcacgttcttccttgtccattgccttgggtggtttcttgagtgtcccaagtggggtagttgtttctcaataggaaagttaactctctgaggacaggacctcctcccacctccctcgcagcagggtccagcccaagtgtgaggagagagcaggtccttaataaaagaaggaaccagcatatacggagcacctactatgtgccaggtacagagccagggcaggtgcgttcaggtaatcctcgcaacagcactgggggtgggatcatcatcccttctttacagatgtggaaacagaggccagggaacggaatctgcccaaaatggcacagctagtaagtaggggagcatcaatttgaaaacccaggtcttctcactccagggctctttctcctacctgtataagctgagggtttggcagtaaatgaggatcccagctccaaggtggttgctttggagctcaaacattagatccccttgagcacgtggggccagccctgagagtccagaggcctgggtccgggaatcctggctctacagcatgacttcatcatgatcttgagtgagtcctttaacttctctacaccagagccagactaatccagtggggttccctaccagggagaggggattcagcaaaaccatcgggggagtatgtttgcaaaccatagggagccagtgtctgcccacagactctgatgttgttcctttgcagggagtacgtagtgtgccatactccactatcggattggcatagcaatctgatatcacacccctcacacctgttgagaatcagttatgatctccaaggttctgacctctgagagtgacataagtcctagggaagcacagccccactccctgagacacctttttcagaagtcccatgaggtcaaagacattggggtcaggatactttaaagccaaaaatgcttaaaagtaatttgggaggggaagacaggtttcaaagggaaaagaaaggtgatagttaggaggaggtttgggagtgggtattaaaaaggaagggttggagtatggcatgcaaacccagctggtaggacagggtcaggccaggccgagcctagagaaatcaggttttagggatctggcttgcctgttgtctgttgtgaggttgcactcactacctcaggaacgggtagggggctttgtcaaaaatgtcttgaggctgggtgcagtcgcacatgcctgtaatcccagcactttgggaggctgaagtaggaggatcactgcagcctgggcaatatagggagactgcatctctacaaataacaacaacaacagcaacaacaacaacgaatagccagactttgtgctgcatgcctgtcgttccagctacttgggaggctgaggcgggtgaatcagttgagtccgggaggttgaggctccattgcatgagggcttgtgattgtgccactgcactctatcctgggtgacacagcgagaccctgtctcaaaaatatatatatatatatagatacataggtatatccatatccgtccatacatacatacgtacatgtctcttgagccgctaagttcaggcaggtcttagatagtaaatatgggaagaaagaaaaacacaactcacattattcagacataatctgcttgccatgtttctcctcttcctctaagacacactcgaatgccccagtgctatgaagccgtgtctgacccacagacaccgtaagtgtgtggccctcctgggtgcactgacagcaagctcatctctctacaagcccccgtgcagtgagcactccgaatcctaattgcctgtttagatgtcagtctctcacactgaactgtgaatgactagagggcttataagcaagcccttttgcttataagcacccaggctaaggaccagcccaaccaaccagagtgacagaaatatgttccaaggccatggaactcaggagcaattttgttctggaggagttgagcatgtttctaacgccctgtactgtttacttaccccccaagagccaccctacatcgggcataattgtaattcgggagagtttctttaaaacataaaatcatttatttatttatttatttatttatttatttatttatttatttatttagagacagagtctcactctgtccccctggctggagtgcagtggtgcgatcttggccccctgcaaccactacctcccaggttcaagcgtttctcatgcctcagcctcacgagtagctgggattacaggctcccaccaccatacccagctaatttttgtatttttagtagagatgggatttcatcatgttggccaggctggtcttgagctcctggcctcaagtgatctgcccacctcggcctctcaaagtgctgggattacaggtgtgagccaccgcgcctgacccacaacatgaaatcaatatctaggtgcagatttcaaacaatatagagaattggtttgtgagaatgacatcattcagttggaacaaagtccagctttggcagccctgttgggaaaggtagatctggcatctacctgtgtggaaagcagagaggatgctgtctggaaagaatgctggtgtgtgtgtgtgtgtgcgtgtgtgtgtgtgtgtgtgtgtgtgtgtgtgtgtggcaggaggctctcggctcatacactctttgtgactataggggaggctgggcttgacttcttgccatcaggctcctgaatctccagagatcttgcggaactttccacatgaaaaaaacaccaaaaaacaaaaaatgacagcctcccttaaaatgcatatgggagacagggactgttgtctggggacccagactatggccacagccacagacttcaaagctgcctcaagcctaggactccagcttgtggacatcttgcaggtctgctttctgtcctctttgaaccttgtccacaatcagtgcccttggccctgccttgcttgggttcatagctaaactctccctgttccttgagccatttttgatatgccaatctggctgcagtctgtttaacttggtaaacactgtaatctgggctatacctctagtcacaggcttttggtcagctagttctgcacacagggttatgtgccacccttcccccatcttggggttcctgccacagtcacagtgcaagtgaacgcaagaaccacttcaccataaaaaaggctgcttcactgccagtggcttctcagataatgggagttggtgccagtggctttggcagcaacatgagatagggacctctgtgcaggcatcagaggccttgatcacaaccttggcagtggtctgtatcagggccttgagtaagcatgagaaacagagatggtgcttttggtggtgccaggacaatgtgctttgttcttttttttgttttatttttttgagatggagtttcactcttgttgcccaggctggagtgcagtgatatgatctcggctcactgcaacctccacctcctgggttcaagcaattctttttttttttttttttgagacggagtcttgctctgttgccaggctggagtgcagtggcacaatctcggctcactgcaaactccgcctcccgggttcacgccattctcctgcctcagcctcctgagtagctgggactacaggttcccgccaccacgcccggctcattttttgtatttttggtagagatggggtttcaccatgttagccaggatggtctcgatctcctgaccttgtgatcagcccgcctcgccctcccaaagtgctgggattacaggcgtaagccaccgcgccctgccgggttcaagcaattcttgtgcctcagcctcccaaggagctgggattataggcgcacgctgccatgcctggctaattttttgtatcttcagtagagttggggttttgccatgttgggcattgcttgtctcaaattcctgacctcaggtgatccgcctgcctcgtcctcccaaagtgctgggattacaggcgtgaactactgcacccggccaatttctttagttaacaattagaatacttatctgttcttattaggaaaaaaaccaatgtcttcctcttgagaccctctcttttctactgaataaacccaagaaatctggggcttattaagtctaaaacagccagtccagcttccaaacaagtcagccaagcccaggttgtgtatctaacttgtgaaaaacaggtcacctggaggggacactgtctgagagccacctcacatctacatggagatggcgcaaaggaatgttgccagttgtggcaaccgtgaaaattcatcgttcagctctcctgccgtggggagcggagttgactggcagccccagctgctccccctccgggtcccccactgcgtttgtgctactgcaggctgattcctgcaagatgctgctgctctgacagacaactctggctccaggactccccactggcctgggagagccttcattgaaactgcactgacatctgacactcttcttaaccaatcttttcttcccgctttccttcacagctgtcagatttttattcctgtctgaatcctctcttgccatttcctgtttgcttccgctttatccttcacagacatttcccccagtaaagcccttgtatgtctaatttggttttggcatctgtttctcagtagacctcccaggcgtacatggtgctggagctggttcccactggcttgtgagggctgagcctatgtctctctttccgattccacactcagtgacatcatgatgggagctcgaaataggtcatggtgggagtatttacaacatagaaatcaactagtgctatgcatgaaggctttttcttctcagtgagctggttgctaaacatttatgagcaaacctctggtatctacccaatagaaatgtatgtatactcaccaaaatacctgtatttgatttccagatgatcatagcatcatgattcatagtaatctcaaactggaaactgcccaaatgtccagcaagagaattaatcaataaattgtcatatcatgatgtgtgtatataagtttctattttattttttttagacaaggtttccctctgtcgctcaggctagggtgcagtggtgtgatcactgcagcctcaaactcctggtctcaagtgatcctcgtggctcagcctgtcaagtagcttggactactggtgcatgccaccatactctgctaatttttatttttacttttgagacagcttcttgctctgttgctcaggctagagtgcagtggtacgatcatggctcactgcagcctcgatctcctgggctccagaaatcctcctctttagcgtcctaagtagctgggactacaggtatgcaccatcgtgcctggctaatttaaaacaatttttcttttgtaaagacaggagtcttgctattgtcgcctaggttggtcacaaactcctggcctcaagccatcctcctgccttggcctaccaaagcattagggttacagctgtgagtcaccacgctcggcccatagtacttttttttttttttgagacagagccctgctctgtcgcccaggctggattgcagtggagcaatcttggctcactgcaacctctgcttcctgggttcaagcaattctcctgcctcagcctcccaagtagctgaggttacaggcacccgccaccatggccagctaatttttgtattttagtagagatgagttttcgccatgtttgccaggctggtctcaaactcctgacctcaggtgatctgcctgcttcggcctcccaaagtgctgggattacaggcatgaaccagtgtacccggccccattgtatgtttataccacgttttgtttacccattcatctatctacagacacctgagttgcttccacctcctggctcttgtgaataatgttacaataaacatggaaatacacctatctcttcaaaatcctgctttcaattatttgggaaatatacccagaagtgaacagctggatcaaatggtaattctatttttaacttgttgaggagcccccatactgtttttcatagtggctgcaccattttatattaccactaacagtgcacaagggttccaatttctctacatcctcaccaacacttgttattgtctgtttgtctgacttctttgtttttagagatgggggtcttgccatgttgttgctcaggctggcctcaaactcctgggctcaagcaatcctcctgtgttcgccttacgaatagctggactacaggcacacaccaccacaccaccatgccagtattgtctgttttttgtgtgtgtttgtttttttttttttttgagacagagtttctctctcttgtcgcctaggttggagtgtaatggcgcgatctcagctcactgcaacctccgcctcccgggttcaaacgagtctcctgcctcagtctgctgagtagctgggattacaggcatgcgccaccacacccagctaatttttgtatttttactagagatgaagttttgccacgttggccaggctggtctcggactcctgacctcaggtgatccacccacctcagcctctcaaagtgctgggattacaggggtgagccaccatgcccggcctgtttttttttccttttcttcttcttttattttaaatacaagctattctaatggcatgaggaaagagaggaattttgatatcctttttcatttctgcctcccagagcatagatcagtgtctggtatacagcagccactcaaaaaatataagttgcttaaatgaatacattgagtgaattgactacctgtgtagtgtgtgaagtgggctgaatggtggctcccccaaaagatttgtccatgttctaatccttggaacctctggatgttactgtatttggaaaaaaaggtctttgcaaatgttgccaggcacgttggctcatgcctgtaatcctagcactttgcaggccaaggcggtaggatcacctgaggtcaggagttcgagactagcctggccaacatgtgaaaccccgtctctactaaaaaaaatacaaaaattagctgggcgtggtgacggttacctgtagtcccagctacttgggaggctgaggcatgaaaatcgcttgaacccaggaggcagaggttacagtgagccaagatcatgccatttgcattccagcctgggcaacagagtgagactctgtctcaaaaaaaaaaaaaaaaaaaaaaaggctttgcgaatgtaattaattaaggagcttgaggtgagttcatcctggatcatccaggtgggccctaaatccaataaatgtccttataggagatacacacagaagacggacatagaggggaggtgacgtgaaggtggaggcagatatgggatttgtgaccacgagccaaggaagccaaggaatgtggacagccaccaggagctggaacaggcagggaagggttcttccctagagtctccagaagcctagcctgctgataccctgatttcagacttctggtctccagaactgtgagagaatacatttctgtaggttggtttttgttgttgttttaaaacttttattgtttttagcaataatcatgtgtgttcattttaggaatatggaatacacaagtaagcagataaaaaaaatcttttataatcctctgtggagagattgtaccttttgtctttcacccttcacgagtttttatgtgcatatatgtgatatccaaatgtactcttacctttcaaaaatgttattcacaattgggcatggtggtatgtgcctgtagtcccagctactgggaaggctgaggcaggaggatcgcttcagcccaggagtttgaggctgtagtatgcgattatcacatctgtgaatagacacagcacttcagcccgggcaacgtagcaagaccctgtccctaaaaactaaaaaattaaaatgatattaacatattacttagtaacccttttttcattttatatcctatcaggaacctcttttttttttttttttttttttttacaaatgagtaaatctcttctataaaagagatttgaagattggttcaaatatggtaaacaatgagatatgggtaaatgatgcatctgaagccactaacagcaacaggttaaaagtagaaagatggacaaaggtatatcagaaaaatgctaataaaaagaaagttatatagcattgttaatatcacataaaataaaaataaaagtaaattgcattaaataggggcaaggatggttttgatcaattttccagtacatccctataagtttgtttcttactctccttatctcgtctatttcatccacttctctaaacatatcttcattgcttaaatgcctcttatgtacatctttatattctggagagatggaattagctttctctaaaagttccttctgcattttcctcctcctctggcttttcctcaaaatttggttcactattttctggccttccttccatttttggacagggtttcatctcatgtctgtggggcttctctttcttccttctattctttctttctttttccttccttccttttgttttcctttcttccctctttcctttcttttttcctgcttattcccctttgagtgcaataacttctggcactgatcaggtaagtttctttctcctctttgtctagccttgcattgtgctaagaacaacagacctgcaaaattctcacaagttgactcttcccttcgttggcccccagcaccttggccaacactgctgaaggaagctggtacccaggtgggaacaagaaccagactagtaggacttctgcactgtcaacttttaaatttctgtggttttatgccaccaagtttgtggaaatttattatagcagtcacaggaaactaatatgtcatctgtaattaggagaaattataagggattttaatccaaaaggatggcttcagtttgggaacttctaatttgaagtacttcatggccatatttagcaaagtcatttgtcttttaacagtagtactgttttcatagtatcttatctatacacaagagaaaatttttgttctctgttgtagaaatttgggggagggggcatgaatctagctcatccaatagaaatttcaagtcttctgcctttaaattgatgtgctcatcccagtgcagcgtcttgtcccttgagctgacataaaggtgaactcctgtacttgtgggacttgtctgaggaggccaccaggagctctgccaacagctcagaggtataactttatgctcccagatcagggactcctaaacactttctcttacagtctgccaaggactattggaatcttattgctggttggttgacagtgggatatccattggagctttcaatggcactttattcctacctagaaccctctcagttgtgtttgttccaaaccttcaggatcaacctctttcacaggcaacgtagtaccttaccttctaggtgagattttaacacctataattagagaattgcttggtcacacattgactaaaagtataaggataactttgggacaataaaatgtatcgatgtttcaaacagtgcagaatgaggaccggtgatgtttgcgggaaagtcagatggtcaatcagatcttacttgagcagtattcaatctttgctttctagtaggtatttgataaacaaacatttgttatatgtattacacatacatggagctatctatttgtatctattggtacccctcccaaatttcctttataggatccttcttactgctgtgaatgttgtctgctgaaagagatgtgtgtacaaaatgctgctcccttacctcaaagtggaatcaattctatggtacaattcatgctctagggctctccataggatcaggctgaagctcaactctagataagaccagaccacatcttttctcaaccccctcctgggctctatcttgcttccttcactgtgtttcttccgagagcaatcttccaatgaattatgcactcagatcctgtttcagggttctgcttctagggaatctgaccaaagacactgcatgagtaaaagccaaaaattataaaatccatctatgtccatgacttggagacaatgcaagcaaagaaacaggaagagatgacatgaaatcagagaaagggccaaggtgagtaagatgccttacttaagtgaaaaagaataggcataggcaccttcaaaccatcctgcactaacctagtggagacaaacccttttggtcatgcagttggcaagaacaatgttattttagtgtctggacttagagtaatttgtatcaaagcctgggtattctttgccactggcattacagtttctgggacctggaaatgaccaccatgacaaagaccagtggaaaaaaagggatttcaggcagaactgctgcagaatcttgctgataaggcactggggtacaacagaggcacttctgaagctacggtgactacggtgacctccttcatgagaagcaactggacaatgatactagtgtattacatatagatgactagttgtagattatacatttatatacaattatactgtcgttcttaattcttaatcaagtccacatcacaagacttattcttgtccttggaggaaccagggtacagagtattctggtaatttattattgtgtaacgaactgtccccagttggctcatttatttgcttatgtatctgcagtttggggcgggttcagcaggaacaacacccccctgcttcatgattggggccccaactgggaagacttgaatggctgggggctggcttcctcacagcatggtggtctcagggtagctggacatcttttatggcaagtgttccaagacacttcaggaggaagctgcaagacttcttatgacctagcataaagtcccatttctgggacctcagaaatcccagtacatcacttccaccatagtctatcagtcaagcaaatcactaaggccaggctagattcagagtggggtgggggtgggggtgggggtggggccggggccaagggttagacctgatctctccatagaaggaatgtaagagaatttgcagccatctttaatctatcacacagacatagaatgtgtaggggactttttgataaacgcagtaaaggaaaaagaagatagcaggtaagattttgtttctttgtttatttgtttttagagacagggtcttgatctgttgcccaggctggagtgcagtggtccaaacatagcttactgcagcctcaaactcctgggctctgtgatccccctgccccagcctcccaagtagctgggactacacatgcacgccaccacatctgactaattttttaaaaaattttttgtagagacaaggtctcactatgttgtccaggctggtctcaaactcctggcctcaggtgatcctcccaccttggcctcccaaagcactgggattacaggcatgagccactgcacccagcgtgtttgttttttaaggacaaaataatttgagcatgtttgaaagctaaggaaaaagaaccagagaagagagtagattaaggaagtaagaaagaatgtttgctgcagcaagattctaaggcttcagagtagcaatatctagtctagggattgctgttcttcagatgcacaccttttctgttatccctgaatgttggtaaaatcatgtgaaacttcacagtgtgggttcagtcttgctgtggggagggaagggaaggaaagggctggttcacttctggcctggaagattagggggagcaatgtctcctacagctagggcatggcctatgccagcctccccatctgatggggtcctgccagagggtagggccatgtcttcaatttcaaaatcctacatggcaaaaacataacctgcaaaccagaatgtcagtgctagggcctaggccgaacaatagttttcctgtaggaatggggagtatgtgtggatgtagagctgggggtaaggcttttgtgcaattcagcttcaccaggcttgaagaagatgcagtgaggacagtcaggacctgagtatgagagtgggacctgggtatgagtgtggaaatccatcttagaaccttaaaattccatactctgaggtaaagctgagaggctccacaggtctatgagggtttttctttgtttcccagggactgtaaggtgcccagattctgaggtaggtgccataggaatattcctcatagcacaagcattatgtcggacaatgttctgcttatctattactgagtaacaaacctctctaaaacttagaggcttaaaataacataaatcataatttatgaaaaattataaataattcatcacttaagggttaaatgataaatgagttatttcttaggattttggataagtcacagttaggaaagacctgttactgttgtaggtaacatggaacagcccagacggttggaataacccaacccagatagcttcttcactcaatgactgatcccttagctaggatggctccaccagctgagcggcccagctctccctctccaagtccaagtggtctctgcacatggtttctctccagcaaggtggctaacggggtgcagctcatgaccaccaacagctcaaaatcaaggctgccaggtctttttttttttttgagacagagtctcgctctgtcccccaggctggagtgcagtggcgcgatcacgactctctgcaacctctgcctcctggattcaagcgactctcctgagtagctgggattacaggtgtgtgccaccacgcccggctaatttttgtattttttgtagagacagggtttcaccacgtcgatcagggtggtctcgaacttctgacctcgtgatctgcccgcctcggcctcccaaggtgctgggattacagacgtgagccaccgtgcccggccaaggctgccaggtcttttttaagctcagagctagaaacaagacattgctactcctaccaacttcttctattggtgaaattgagtcatggtttctcatggtctcaatcatgacccagcccagattccagggtcaaggaccataaaaggctacattgatggaagacatgtctcattgagggacaccagagtaacaactaccagacaagaaggggcaggtctgtgtgagcgccatttcctaattctatattgcccactcttcagagaagatggttggagggcaaattgtggggagcaaggtaactccaaacttttacagaattaaaggtagggggtctggtcagctacagtccatctgttatcaagaggcctggctgtgtgtcttcattcagtttattaggcatttactgagcacagcctacatgccaggttcttcattttttgacacagggtcttgtgttgcccaggctggagtgcagtgctgcgactgcggctcactgcagccttgacctctccagactcaagcgatcctcctgcctcagcctctggagtagctggggatacaggcgcgcaccaccatgctcggctaatttttgtatttttagtagagacagtgtctcaccctgttggccaggctggtctcggatcccagagatcaagtgatccgcctgcctcagtttcccaaagtgctgggattacaggcgtaagcctccgcgcccggcctatgccaggttctacatgtgttctttcttgactcttgtgttacagaggctcgaatgaagcctggcttctacagtaccgcacccagcacctcgctgcgatgcagcctcctgtaccctttccgtccggcagctggagttagggcagagtgccgggtctctaggagggcaacactcaacgcagtcggctcctaggcatccagtggggctgcaaccccgccgccggggacgaaaggcgaagggggaaaactagagctttcgccggccgggacagcgcagccgggtttcagctcgttctacggtccacgtcagaagatcgcctccggcgccgcggacgccggagaccactgtctgcgcccccgcacgcacgcacccacgtactcgcgcacgcgcgcgccggccccgcccaccgccccgctgtggcccctttggaccgcacgagccaccgtccgcacagccccgccccgcacggccaggcgaagcggagccggccgtgcggtgtgtgtgtatgtgttcgcggggcgccgtctcagccccgggaagatggtggctgcagcggcggcaactgaggcaaggctgaggaggaggacggcggcgacggcagcgctcgcgggcaggagcggcgggccgcactgggactgggacgtgaccagggctgggaggccggggctgggggccgggctgcgcctcccgcggctgctgtctccaccgctgcggccacggctgctgctgctgctgttgttgctctcgccgccgctgctgctgctgctgctgccctgtgaggccgaggccgcggcggcggcggcggcggtgtcgggctcagccgcagccgaggccaaggaatgtgaccggccctgtgtcaacggcggtcgctgcaaccctggcaccggccagtgcgtctgccccgccggctgggtgggcgagcaatgccagcactgcgggggccgcttcaggtgagtggcgggtggtgtcggagggtcgggtccaaccagaggctggggctgaggggcgttcgagacggctccaggtcagagggagatgctggacagaaagtggagagggtagggccgccctatggggtttgagggccatttgcttccggggagatcatcgtctctggcctggggtctttctctgttggaaggtgaaaaggtgtggggcaagggtgggggcaccccgacggtatttgggtgcttaggttagttagatgggaagaatgctgagggacccaaagagcatcaaagccgatcgctctaaaactcggcgtgtttcagctaaacgaggtatccaaggaaaggtggtcgagccaggtttgcttgaacacttccttttaacatccacatgtgccctaggacccgatgagttccccgatgcactggagatgtggggtgctctgaagaaacagggccctggaaatgctttgttggctggagataaaagggaaagggtagcattgtaagatattagggatagaaggaccagtggtccttctaaaggaaagtgaggaaactagccttttggcaaaagctccctggaggtggcaaattggaatagggtctgtggtgaagagggaatggaaggagattcctatttgccttggtttctggacaatatgaagttctgaattggcttagtttggggcagttcctcttggagaaatcaataaattaattagcagttatcgttatttgcttcagttgtgcaatgattttccagataatacagacagattagccagactttggccttgtccacagggagtttggaatatagcaagagaaagataatgtgcgcacataaccctagtcataagggttacagagtcattcacgcctttgacaggtatttagcttactgaacacatgtctgatgtgggggagtggggaaatgtgaacaagacagacagggcctctgctctcattgaccttaacattctagtgggagcaacaggcacttaacaagtaaataaatgagagaaataaacatggtaatttcaggtaatggtaaatgctatcaagaaaataaaaacagcgtggtctgatagagaattataaccggtggtgactcttggagagggttctcatttgaaatgacatttgatctgagacctgaatgaggcaacagggaacttgtgggaattcagggatggagaggttgtggctagctggagggatgcaaggaggactttgaggaggcggtaacattggatttgagcatgtaaggttaagtaggatttggaaatgtggagctggaaaaaaattacagatggaaagaagggtgcaaacaaagttgtggaggctggaaagtaaagttttgctgctgcctatgtggaagagagttgtgagagaggagtttggaatagcaaaattgtagacttaggtaatattaggtcttctgaggaactcagagaacgttgagcagatgagctctttagttttatggatggagaaaccaagttacttcaggaccactgatgcagtgaagctgcttttgtaacttagggtgttctgatttatgaattccattaacctacatgtatttgttgagggctcctatgttttaggttgtgagatacagtggtatacaagacaggcacagtcctgctcttacggagctcacatttcagcttgggagtaaaaaaatccaacaaaaattttattgtaattttgtttaaggctgtggaggtaaagagcaggagacaaacagaggacttgacttagtctaggggtaaggtaagtcactgaggaagcgatgtgaagtctgaggggtgagatggtactacctgcgtgaggggtggggtgctgaggggccagcaggtacagaggcttggggttgaagcggatggaaggccaggtggcaggagcagagagagcaaaggggagcttggcaagactggagagaaaggcgggaagccaggccaagtggagatctgtgggttggattgagaattttgacctttagcccaagagctgtgaaatggcgtagttcacgcctattttcatgacattataggcttttagattggagccagaatacaaatggccttgaaggtgaggccagggcattttccatttgagaagcttccaaggtcaggtgaatggatggttgagtcagacgaggatccttcaagttctgaaaacctgggacactgtggtaggcagtggggaccagcggtgtgggaaggggacttcatagcaagatcaatctgtaatgttcagagtaggtacactcactttgggcatgagagatagggggcagctaggtgggatctgttggcatgggtcagagcagtggtaatgagagcttgtagaggtgaaatggacaagtcttccgtgtaaactggtttgctcttggaaaggtgggggatggtgagggaaagaaaactagatcctgtcttgggtggttgagaggacagtgataccattaacagacacagggacacaggagcaggtgttagacatttaattgcatgcatgctgagtttggggtgctctcagagtacacacctggcagatgttaagtttggagtcatcgacctatgagggagattgccagggagctctctctgagagtccacatggaaagcccagaggattggataagagctacttgttgcagggaacaggcagtcctgacactggttgtctcaaatagtgtcacaggtgagtgaagggactcccctgcttattgtggacattccctttgagctgattctaggtgatgtcagtgctgtttcctgggtagacaattatgactttggtcctgatgataccattatattttgtgggctttgggattttgcatttttaaaaatgaaagtaggaggaacttatgactctggtcttttaaaaaaaactcagtaggccaggcgtggtggctaacacctgtaatcccagcactttgggaggccgaggcggtgtatcacgaggtcaggagatcgagaccatcctggctaacttggtgaaaccccgtctccactaaaaatacaaaaaattagccgggcgtggtggcgggcacctgtagtcccagctactcgggaggctgaggcaggagaatggcgtgaacccgggaggcagagcttgcagtgagccgagatcgcaccactgcactccagcctgggtgacagagcgagagtccatctcaaaacaacaacaacaacaacaaaaactcaataaaattttagtcgaggccaagcgcggtgactcacgcctgtaatcccagcactttgggaggctgaggcgggcagatcaagaggttaggagttgagaccagcctggccaacatagtgaatccccgtctctactaaaaatacaaaaaattacctgggcatggtggcaggcgcctgtgatcccagctactcgggaggctgaggcaggagaattgcttgaacccgggaagcggaggttgcagagagccgagattgcgccattgcactccagaccaggcgagggtgtgagactccatctcaaaaaaaaaaaaaaaaaaaaaaatttagtccaagtattcttttgggggcaagagtgaaatgttggttttgattgcagtggcttgtatcttgattgaacttacaaacctctttgttattaaaagacattaaatgaatacctttctgatttagaatggcatcaagttggagtgttttttgagctttttagtcctgtaaatcctgtgttataattgccgttatagggttttttcattaattgaagggaacgtaggctaacgaggagtggatttccctaaggttatcactgagtgcagactatgtgccacagagcattttcatgtacattgtattatttaatcctcaggacaactctgagggtgttatataaaatttagattattgaattattgtagttagtaacattttttctaaataaaagatgacatagaaatgactgattttaaaggataagttaaaggatgtcagtttaataaaaatacctatagaatctttggtgtgtgatttctaaggcagtaccactttcgttcattcttatgtgaatcttcataattcagtgatcatttttttctacttgtaaggtcaccagtgtaatttttcttcgaaggataaatatgcccataggataaattaagctcatttttgaatttaatattcattcaattcttttaagttcctgctgtagaaaatgtttgggagaattgaatagaataatctggtgaattggattgagcctgataatgttaagatgtaccttctgtagaaaaaaaaagaaaggaactaagcacttatcagacatctgttttgtgcccagcacatacagtaataatagtgggtgggtgtagtagctcacacctgtaatcccaacactttgggaggcagaggcagaagaatcacttgagcccaggagtttgagaccaacctgggcaacaaagtgagagctcctcactaccaaaaaaaagaaagttagctgggtgtgttggcatgtgcctgtggtcccagctacatgggaggctgatgcaggaggatggcttgagcccaggaggttgaggctgcagtgagccataatcatgccactgcattccatcctgggcaacaaagcgagacccttgtcacaaaaaaacaaagcaaaacaaaaaatatgtatatagtgccaactgcctattagaaataactcccttttagtccttagagtgaagttattcccatttcacagatgagtaaacttggatgtactgaataacttgtccaaggtcacagaagttgtgcaaaattgagatttgaactcagggttgtctaatgcccaaacctgtgttctttttattataccatttggcgtctcatttttttctgagtccagtcactctttatggacgttctttgaaggactgacctaattccaacaaacattttgagaaataaaggaaggaaaatagatttttacaataggaaagctaacattttaaaaatcttaaattcacttcagtctctctggctgacgatctgaggacataaatacctttttaactaatgaaatgaaaattcttgcctgggcgcagtggctcacgcctgtaatcccagcactttgggaggctgaggcgggcggatcgcctgaggtcaggagttcgagactagcctgaccaacatggtgaaaccccgtctccactaaaaattcaaaaaattagccaggcatggtggcgagcgcctgtaatcccagctactcaggaggctgaggcaggagaatcgctcaaatccaggaggcagaggttgcagtgagccgagattgtgccattgcactccagcctggacaacaaaagcaaaactctgtctcgaaagaaagaaagaaaattcttgaaaacaaaatgtgaagaagtgaaaagttaaaacttttttcttatagtaattactaagtgatgtcaacctcaagccctaaatttatgttcacaagtccagtttaggctgatctgctttccccagtgcaatgtaagttccatgagggcaggggcctggagcatagttcacaagtccagtttaggctgatctgctttccccagtgcaatgtaagttccatgagggcaggggcctggagcatagttcacaagtccagtttaggctgatctgctttccccagtgcaatgtaagttccatgagggcaggggcccagagcatagttcacaagtccagtttaggctgatctgttttccccagtgcaatgtaagttccatgagggcaggggcctggagcatagttcacaagtccagtttaggctgatctgttttccccagtgcaatgtaagttccatgagggcaggggcctggagcatagttcacaagtccagtttaggctgatctgctttccccagtgcaatgtaagttccatgagggcaggggcctggagcatagttcacaagtccagtttaggctgatctgttttccccagtgcaatgtaagttccatgagggcaggggcctggagcatagttcacaagtccagtttaggctgatctgctttccccagtgcaatgtaagttccatgagggcaggggcctggagcatagttcacaagtccagtttaggctgatctgctttccccagtacaatgtaagttccatgagggcaggggcctggagcatagttcacaagtccagtttaggctgatctgctttccccagtgcaatgtaagttccatgagggcaggggcctggagcatagtgagcagtaaatatctgttgaatgaaggaataaaattctgtaatttacttcttatgacttttaaaaaagtcgtctttacccacatgactgccatatatgtcttctgtccttatattgctcctgaacttctctgtcatccactgtttggtgggcatcttttattgtcacctcatactgaatcatgtataacaccaaacttctatcctcattgaaaaaaatagtctttttctttgtacttccttatttgttttagctaaatccaaatttagctaaccaaaggtcaaaacttagcagtaatctttggctctttctacctgtttgtttttttctgctctcacactgtataaatttgtttctttccatttcttctgctgccattctaatgtacctaacccttcacctcattgctgacctgcttctgttgcacttttactgttttcttacacctgcagagtctgcttcacactttgtcatatcagtcttctaaaaaacatgtgtctctatgcacacgtatgtttattgcagcactattcacaatagcaaagacttggaaccaaccactgatgggctatccagcccatcagtgatagactggataaagaaaatgtggcacatatacaccgtggaatactgtgcagccataaaaaatggtgagttcatgttctttgcagggacatggatgaagctggaaaccatcattcttagcaaactaacacaggaacagaaaaccaaacaccgcatgttctcactcgtaagtgggagcagggaggggaacatcacacactggggctttcggtgggtagggggataggggagggatagcattaggagaaatagctaatgtagagtatgggttgatgggtgcagtaaaccactgtggcacgtgtatgtctgtgtaacaaatctgcacgttctgcacatatatcccagaacttaaagtgtaataaaaaacaaaaacatgtgtctcttattttgcttcttttattacctctaaaatgatcctcagcagaaggatcccattcctttcacatccctttttttcctaaccaaatctttctacttcgtagtttttctgtgtttgctaaattcagcacctccctcctcactgctcccccattctttcttttcatctctacttaccaaggcccaccttcagttctctataatctataattcatacccttttttttttttttttttttgagagacaaggtcttattctgtcatctaggctggagggcagtgctcctgggctcaagtgatcctgccacctcagcctcccaagtggctgggatcacaggccagtgtgcccagccaatttttaaattttttgtagagatgaggtctcactatgttgcccaggccaatctggaactcctgtccccaagagatcatctcgtcttgacctcccaaagtgctgggattacaggcatgagccactgcacctgacccctattatcttcttttgaaatgagtcatctgctaattcacttcataaatatctgctgaatattgtgtgttaggtactgtgcccttccttgaggatatgaaggtgtgtaagaatcaggccttgctttcccctaagagaagttataactatgaagggaagacagctacgtacacagcaattagaatttcataataaaaatacaggcaatatgtggtgctggactaagatgtgattgacttaactcttttgggggttctggtggaagacatcacagaagagaggacatttgggcaggtctgagaggtttagtgtgagtagaccatctgggggagaaagacattccagaaggaatgaagagttgatgtgcaaaggcaaagaattatggattatcatacttagtgtattaatttccaagggctgttacagtgaagtgccacaaactcatggcataaaacaacagaaatttattctttcatagttctggggactagaagcctgcaatcaaggtactggcagggccacgatctctctgaagactctcagggaggatctgttccatgcctttctcttcgcttctggagttgccagcagtccttggcattttggcttgtagatgcatcacttcagcctctgcctccgtcccttcaatctcatgtgatactctccctccctttgtgtctctgtcttttctcttaagggtaccagtcatagtggatgaacgagtatgacatcatcgtaactttgttgcatctgccaagaccctgtttccaaataaggtcacattcacagggacccagggttaggactttgacatatctttttggggaacacagtacaacccacagcacctggagaactgaatgtaggtgcctgttgttggaacataacttgtgaggggtgtaatggaaggaagggggtgaggttgtaaggttataatggcctctttttgtcccttcccaacaatctccagcttctgggtttatgcttgacctaggataagccctcagggcattccagtttctggccgtgctgattgttttgaaatgggtttatgattgattttaatggactcaatcagagtgaatctcaggacttttgtcggagatccctttcctctgtgggcgtttagaaggacatgtgttgccttcttttctgtgtggcgaggccataatgcctagaactgttaagagttagcgttgctgctgtaaggaattcacctcaggtcagaacaactcccagaagatggaggatggcagagaaatggagccggagacctgataactttctgaatctctggatcaaaacttgcctgaaggtgtagtttttggtttgtgaagtactgcagtccatgtttttcttaagccggttagagttggatttccttccacttacagtagaacaattcctaacatacagagggagggaggtagagccagctgactagggttagtcagttagggcttctgtaacaaattaccatagactttacctcgatgaaaggttcccaagatgggcagatgctttttatttaccgcagtatagaggacaggtatgtacgcaggagaaaaaggagagtgtgtgtttatgatcagaacagttttgatcatataaatgtgattaagtgatttaatacatttgtaggttatttttatcttaagaaatacagaagtgagtacctagtgttatgattgaacagaaatcttacactggtttttcttgttaatacaatcatatttccaaaactgaaatgaaactatagttgtactttttgaaatacttgtgtctggaaattggccattaacttactatgatacttgtttcccacttaaatagtactctcctattttctgtgaattcccaaatgcattttggcaagtgacttccatctatatactatatactgttctcatctttcatttttactttgttccttccattttcccttttctttctatacttcaaactgctctgttattattaacgtgacttccttcttatgagggctttcttatatttgtcttgcttttttcccacttttcattttctttatgtcatatctctttaactgcttttcttttatcactgagaccatggttcgatatcctttcaattaaaacattgaaaaagttttttttctttttctgctagtggattgatcttcgagtgtttgagacaggggcttaccctgtcacccgtgctgaagtgcggtggtgcaatcactgctcactgcagccttgaccaccttgagcctctgggctcaagtgcctcccacctcagcgtcctgagtagctagaactgcaggtgcgcaccaccatgcctggctaattttttaattttgtggagatgaggtctcactatgtcgcccaggctgatctcgaactcctgggttcaagcaatcctctcatctgcgcctgccaaagtgctgggattacagatgagagccaccatgcttggaccctttaaatttttaattaagttttcagtttttttcagtttgcgttttgggtggacttcagttctagctgtttatttacatgcttacctattgagaattttctgtttttcacttagagaagttaattttagtaatgggtgaatttccttttttttttttttttttttttagaatttgacattaaaagtatacaattattaaatgaatgaattttccaattaatttctcttggtcctttttgtattttaagaattttttgattggtttactaataagccagtaaacattaggggctggaattctgtcagttgctgttaagagtcacataagtaacctcccttgacctgtgttttctaaatttttaaattcacagatcctttcacaaaaatgtataatcttatggactcccgtaggaattaaaaaataataatcttttaaaaaatgtatcctgtttttaagataattttaaataaagtaaaagtagtttgttaataaagattataatgtctattttaaatataatttataatgatattcaaaggaaaatttgaccttactctatttaaaacgtggtgcatatattgtttcatgtactttaattatgtaaggaaaagcatgagttgtagacaaaaaaaaaagacattacattttgggataaaatgtatattaacatagagattgaatttaactgtgttttgtgctattaaaaatagttttcctgtcctaatgtttgatattcataaatatgtgctttcacaattattttttagaatttttttgcgtgttttgattctgaatgataaaatgatagcgattttcagctatttgtaagcatttctctgcaaataacacatttcctgtttggatagtttttctctaaattgaatgaaaaggccaacctggctataattgtcactcagttttcccttttgaacactgtttttgaagtactggagatatcaaggattttgatcagaaggtttggcaaagatgatcttgagacagatctgcagaattagattcattttatgccttctcagaacttatatataaatatcattgtgtcttatgcttctcttttgatagatgacatgactgtcttttaatgggagcagtatttggacaactctttgagaaacactgaccaatactgacaaaatgtataactcatttttttaaagtgatgatatgtttagtgctggttcagtctctgaactaactataacttcctattaatatgaaatatttgaagcctatggaagagatgcgaggaatatctctttgtacttgcaacctggtttttctgaattttcttcatattaatgttattctaaaaagtaaaatgttacagatactgaccaaggtccccatgttaccaccccttcttaatcctcttcaccgtaccctttccccagaggtaactagtatggtgaagttgatgtttattatttctcttgcatgtttctactcttattacagagagtacagagagatatttctgcaaacaatatcttattcccaaaaacatgtagcattttttaatcttgagatgagatatgctggagatttatctgttgataaatgtagttctagtggattcatagttaatattaattacagaaggattccagtttacttacccattttcctgctgatgggcatttagagttttccaacttttgctgttacaaatagtactacaattacattctttttttttgtgacagggtctcactctatgaaccaggctagagtgcagtgatgtaatcaccgctcactgcagccctgaccttcagggcttaggtgatcctcccacctcagcctctggaatagctgagactacaggcatgtgccaccacacccagctaattttttgtgtttttagtagagaccaggcttcactatgttgcccgggctgatcttgaactcctggcctaagcaatttgcctgcctggggctctcagagtgctgggattgcaggtgtgagccaccatgcccggcccaattagcattctttacctatctctttttgcatacatgtgtgatttttctctagggtagtgatcttcagtcttttgaaacacctccaaaataactgaaattctttttacttccttgctttcaggttgacatgcagttgacacatattatttttcaaaaaaaaacagatttatagagttgaagagatacaatttctgtatattataaatagagctgctgaaaaaattccccattatacagtattactttaaaaatatttattgagtagaatccaaattccatagcagtttaataacctttctcattttaaaaaatacatgaggccgggcatgatgactcacaccataatcccagcactttgggaggctgaggtgagaggattgcttaagcccaggagtttgagaccagtctgggcaacatagggagaccccatctctataaaaaaatttaaaaatttgcagggcatgatagcacataactgtagtcttagctacttgggaagttgaggtgggagggtcacttgagcccagcagtttgaggctgcagtgagctaagatcacactactgcattctatcctggatgacagagagggaccttgtctttaaaaaaaaaaaaacaacaaagaaaccaaaacccacatgtagtaaatgttattattcttttcctttatggcttgtcctttttgtgttatattataaaattcctttcctgtactgaccttgtaaatatactcttctatattttacttcctcaaaatttaaaatttttgctttattccattctgatcttttatccacctgtaacttgtttctgtgaatgatttgttatattgacctaatttaattatctttatatggtaagcggttgttgcagttccatttatagaacagttttgcccctgctccccgtttgtattgaattgtgctataatcatttaaaacttcagacttgtcttgattgttcttaactcttggctcccctaatttcaacaaaaatccctgttgatattttgttggaatttcacctgatgttgagataagcctggggaaatctgtcatctttattatagagggtctttccatccttcgcatccttctggaaagatgctttatatttccagtttaggtctcatatctttcagtaaattcttatagcttttttcaaatgatctgacacacttttattagatttactactcgatagagaattttgttattactagaaactaattgattactatagtacctaggaatggattttaaaattattattattattattattattattattattattattgcactgagtaatatttagctcatgagtatctgtatttatctgggcacctctctgaagtctggtaaacttattcacctgtctggatctaggcaggaggttgactgggctcagctggtggggatgggggtgtcacagctgtcacatctctttgtaccagaggctggctgagcctcaccatcatggtgatggcagaagtgcaaaggcagaatttatttcctcgtattttgaatttttatatctatgaatccttcctaagctcttgtagtactggtagcttgtgtgtggattctcctgttccccatgttgatagtcatgctgccaataagttgtgacagtttacttctaaactgtatacaccttctttctttttcttgtgtaattaatgagctagttcatgttgttgaatattatcaatgtaggacattgttgaatggtcttgatcctgactttaaaaagaatcctatggaatagttccctgcacatagaaggtggcctgtgattatattgatttttgtcttttcatctgttaatgtggtaaattacacttacatactttttaattgttagaccatctttgtattcctgagttgaacccattttggccatgatatgttttttaatacagatttttagatttggtttgccaatacatttttttgaggtttttttttttttttttttttttttttttgagttggagtcttgccctgtcgtccaggctggagtgcaatggtgcgatcttggctcactgcaacctctgcctcctgggttcaagcaattctcctgcctcagcctcccaagtagctgggattacaggtgcctgccaccatgcctggcttatttttgtatttttagtagagacggggtttcaccatgtcggtcaggctggtctcaaactcctgacctcataatcctcctgcctcagcctcccaaagtgctgggattacaggcataagccaccccgcccagcctgaatttttgaactgtgcttgtgagcttttcttttggcaagcatgtcagattttgtctgttgttttattttgtcttcacccttgaatgctcatatagctgggtctggaatttaagattgatcattattttctttgagcaatttgaatgtttttttccaatgtcttctgatttttattactgatgtttcaaagtcagctgtcagtctaattcattcataggtaattttttttctttctctcttttttagcttcttactctggaaaatttcaaataaacaaaaatggaaggtataacaagtgtgacgtgtctgtcaccagcttcaacatttgcaactcatagccagtctttttcacttttaccactgccccattcccatgccttcccctcctcccaccagccagcatagattattttgaagtaaatctcaggtgccattttgtttccttctggttgtttttcttttcctttttctttttttcctttttatttttatttttatttttttgagacagagtcttgctctttcactcatgctggattgcagtggtgtgatcttgactcactgcaacctctgtttcccgagttcaagcgattctggtgcttcaccttcctgagtagttgaaattacagttgtgtgccacttttttatttttagtagatatggggtttcactgttgtctcgaattcctggcctcaagtaatctgtccgccttggcctcccaaagtgctgggattacaggtgtgagccaccacaccaaaccattctggttttttataagtgctcttgcttttactcatagtctatctctgttatttttttctttccctttctcttttggttgattgtattaacgtagtattactatgatgtgcccaaatgtggatttatttttattttgctcagtgtatgtgcattctttatctgaggattcaagtctgttatcatttctgggaaattctcaggtattatcttttgaaagcttcctttacattttatttgttattatctcttagtacgacttttagacagacacatgttgcctattctttttattctgtttactttctacttctcataatttttatctatttccctctgttgcattcaggataatttcctcagatctgttctctagttcacaaattctcactttaactgtatctaatttgtggtgtaacttgttaaattttcattttcagtgactgtatttttaatttctagaggttttatcttttattaataaaactggctgcttattttcatagtgttattttttgatacttttgatcctattgtgcctttaagcaattttaattaattaattaattttttgagaccgagtcttcttgttgcccaggctggagtgcagtggcatgatctcggctcactgcaacctccgcctcccaggtttaagcagttctctaccttagcctcgcgagtagctgggattacagatgcgtgccaccacacccagctaatttttgtatttttagtagagacagggtttcaccatcttggccaggctggtcttgaactcctgatcttgtgatccacccgcgttggcctcccaaagttaaatttattttatgttctttattggattgttctagtaactgaactttatagggtctaatgctgttgttagtttgctgatttttgttcatggtacattgcttcaattttgtcaaaaatttgagttcctcttcagtgagactttatcaatggacatatgtctctagagagagtttgtgattacttcttctagatatctttgggggtattctgacctggggctactttctatgttaattttattttcttatgggtacctagaacccaagtgagggtggtatgtattagaactcaaatgggtgtgggactcgttatgaagtcattgggagggattttcccctgccttggtccatgctgaaactgctttcttgttgcttttctgtgcctaagagctgggtttggtttttaaaagctctttaagggttccacccttcttgaagggctctcggttccaattccctgccttacatggacctaggcctcagtgtcttccttttgagcatttagatccagattattttatagaagatgatatgctcttggatcatggggattgacagcctctcacaggacactatggagttggctaacatgttccctgctctgattttcaggtctctatttttggcctttactgatttctcttactttttttcaggttcagctggcagttaaaatgatgttatattgcagattgcatttacttcttgattttaacgtagtgaaatgtattgatttttttccctttttgtgtcttgttgaaatctttccctattccaagatcgtggagatattcttctgtattgtcttctggacatttcattgttttgtctttcacacttaaatctacagtccacctagagaaagagtgtgtgtgtgtggtgcgaggttagagacacatttatttgctttatgcatattcagattcacatttattagagccacatttatttgctttatgcatatccaatcccattttttgagaagacctttcttttcccagtgctctgtagtgctgcgtctgttatcaatcaggtgtttatgtatatatgatctgtttctggactttctgttctattcctttggtccgtttgtctatccttatgccagtaatactgcactatcttaattagtatggatttatgttaagtcaccttaccttattcttgttctttttcaggtttattttggctcttcttggtccatggcatttccatatagattttagaatcaccttgttcatttttgacaagaagaatatcttgagaatatgattaggttggtaatgaacctataactcagtttggagtgaattgacagcttttataatgttgagtcttccgaaccacaaacatggtatatacctttatttatttaaatcttttctaatttgtcttaatgctttataattttctatgcagaggtcttgtagatctctttccaagatatttgatgtttgtttgtttgtttgtttgtttgttttttgagacggagtctcactctgttgcccaggctggagtgcagtggcgtgatcttggctcactgcaacctccgcctcctgggttcaagcaattctcctgcctcagcctcccaagtagctgggattacggttgtgcgccaccatgccagactaatttttgtatttttattagagatggggtttcaccatgttggccaggttggtcttgaactcctgacctcaagtgatctgcttgcctcggcctcccaatgtgctggcattacaggtgtgagccacagatatttgatgttttttatacttttgtaaattgtatctttaaatttttttttgaacaaggtctggttttattttctggcagaatcttttaaaatataaaacagataaaacacatctcagccctgcaatctgccagcatgccttgtttctacaggatgcatgctagaccatgagactacgtagcaaagggtctttaagagaatttggttgggagaaatagaaaaaacagatctcagggaagcctgggctagcccaaaagctgagctacatccctgagcactagagcagtccttgtcttttcagatcctcatatgtcttcttattcacaacattcccacttgagtcttcatattcttcctccagtgtcaggctgccatcattctgaagccttctgcaatttgaatttggcccacaaggagacagcatcttcaatctgcgtcacattagcaaagtgagcagtgtttgggatgcccaaacacctcatgccatgagcatgatgctattcagcaaagtgtcactggaaggctttgcgcccttggtaggtgtagtttccacaaatctcacagttatagttgatatttaggccatgaagcttatatagccagtagggaatgcgtttgccatcccagccaagtggcaggtttttggggttgtaaatgatctcgttcttttcatcttcactctcactcttactgatctgctcttcttgctcttctcctgtccttgcttgcttgcactgtgcattttcatgagtgagatgttgctgttccctgagagtcagagtattcatagatctgggcttctagaaaagcaatgtctttgttctctcaatgtctcgcttggtgccctttgatttgggatttttggcaaacaaagagttatcaagtgactccagggactttcctttggtactgaatagtctctgggcttgctcttctacggtccgccacatttcaagcctaaagctaagagagcagatttcaatctgtccaaacccagagaggccaactcctcccaggaggagaaggcggagaggtcaagatgggctccagcatgggtcagagcgctgcttgtctctttcgcccatccaggaaggtcacattctcccatttcttctcaaactcagcctgaatcttcccaaaaagttcattctgatcttggagaggctttactctatctgtgtaatcctgaagttactcaagcagcatctctaggtatctcttatactctgcattcttcctttctttaggaatgtcaaataattggtcagagatggacaggtatgtgatataatccagcttctcagatgccttcacgttaatgtacttgaggtaacagtcacggagatcgaggtaacgaccatatccctcttcatctgtgaactccaccaagttttgtgcctcttcacttggattctctgagccttcaggagctcctcaaatttcactgacattggcacacagatctcatttgggtgcttctggtggaattcctttatttactcgagtctattatagaattcagcaaactcactgggtcctgaaatggcattgagttcctcctttcataatccatctttatcatcatacagatccctcaggttcccactgacctccatatacctatcttgcatggcctgagtgcggtgatcagaattgagcgtggacttcttagtgagcatctctttggccatgacgtccatgagcctttccttctcctcatgatagcgccgctgctgctccagtattgtctccatcttcctttagccgcagcctctcttaaaaattttatgattagttgtttgctgctggttaaaggaaatgcagtggactttttgcacctttcctaaagtattttattgattctaataattatctgcagattattagctctctgggggaaaaaaatcaaaaaaaacccttctttgatcccccgtgtcttctccaaatgtggcctcatttctgtgtttcattttacaacaaaactcctgcaaatgaaattgttctcttgttaacatctcctacttcctcacttccaattttctcattaacttatggctgctagagatcataggggcagcagtgtccacagcttgtcaaatccagtggttaattctctggccttgtcttactaaacttcataacgtttcactgcttcctttttgaaaacttgcttctggatttctgggactccatgctctctctcttttttgccatgcttgactgactgctcatttgcagactttgtcttcttctggcttctaaaagttagagttcttctgggtacttgctgtgcatctgcactcaatcgtcttctgtatctgtacctgaaactcagatgttcttctcagtctggggactttgaatactgtaacattgaacttttgatttttattccaagcctgtttgaccctcagttttcttagcatttgtatgagaccactcaggctagaaacctgggtgttttctttattcccatttactcacttgcaaactattattaaatcttgtctgttcaacccccaaaacttatctaagtatctgctggtattcttttttcttcatttgtgggtagaagcaagattgtgtaggtctttgtagtcttaaataaccataaaaaatttctggaaagtgtaaggttgtatgcaaataaaaggtatcagatggctaagaggagtggagttaaatatcaggatccttaaacttcttttctttatcttgcccattgccttttcttttctttcattgctatatatttacgtggactctttcaaagagattatagttacagagacctgatagccaacaggttgaatgtaagccttatttgtgcttatttttgcctaatattcagggccctgtgagagattctggttgttgaatatacaagaagggttgagagcatattctagataggggagtgtgtgtgtgtgtgtgtgtgtgtgtgtgtgtgtgtatccgttctctgggcagggaggggaatatggtaggagcaaaagcacaagagaggtaggagtgggcactgagtgtctgggggaccatgagaattggcttcgcaggtgagaggagaaggattgacattcttaatagttagaatgtcaggaacaggaggagttcagacttcattccacagtctgtgcagagttattctaaatattgacaagggtagtgacatggtgacattggtgctttaggaatgttgttctgctgtagggtgcttagtaggctttgtggtctcagaagctgctgaaggtagccagaggtgttagcaataagactaccatgaattgtttttgagcttggggtagagtgggaatggagatgaaggaatacacctaaggaagtctttgatggcagttatatcataaattgttcatacatgtgatgaatgggatatcaagtacaggaagaaactaacaaaactcataccaacgttttgcgcatgggagaagctattttatcatttcgggtggactgtagttgaatgggaagagataattctgccataagatcagggttgaattttgttggttctggaactcagtttttgctgctgtactgtccagagagagagagaaatagaaagggagagagagagagagagaggcgcgcgcgcgcgtgcgcacgcacacacacacacacacacacataactaatatatataaatacatatatatgtgggtatatattatttatttatgtatatataatataatatactatatagataatatataattatctataattatgtaaaatataattgtatattatctataattatataaaatatataattatatatgtattatagattatatattatatataatttaatatatataatatatatacatatgtaggtacgtttgtttgtgtgtgtgtgtgtgtgtgtgtgtgtataattaaaaaaaatttttttagagacaggttctcactctgccaccaggctggagtgcagtggcatgatctatagctcactgcagccttgacttcctgaactcagataatccttccacctcagcctcctgagtagctaggactgcaggtgtgtgccataccacacctggctaaattttttttttttttttggtagagatggggtctcacgatgatgcctaggctagttttgaactactagcctcaagcgatccatctgcatcggcctcccatagtgtttgggattacaggtgtgagtcactgtgcccaacctatttttatttttttgtagagatagggtctcacagtgttgcctaggctggtctcaagctcctggcctcaagcgatcctcccagctcagcctcccaaagtgctgggattacaggcatgagccagtctggctagcctgagtttttatttagaaaaacatgaacaacctgtatatggctgctgtaaaccaatggactttctttgttcttgaaccaagctaggcatccacacggcacctattcatctgaggggatagagtcagtgttcagatgtctttgaaagaaaggtccacctgcagttctttagcttctgaaatgtttttttcttttcccatactgtcatggatacacacgagattgttctggacttcctttatagtaaactttgctcttaataagagcttgaaaatttttgttgttgcaaaactgtgttagagttgatactgttatttattaggcaacaaatgttacatgaatatctatgatgttttaggcactggcgaaaaagaggtgaatgagatatgttcttgagaaagtcttggtagtgtagtgggcagagattattctctataacagtaataatcaaaccacatgataagtttaccacggagaaggcattaattagctcagcactgaaaacttggggcacaggttcccagagctccaagggacatttgaagtgagatctgaaaggttggttaggaaaaaataagttattctagacagagaagtcaggctgtgctgagccacgaagacttaatgcaggtgagttgaggaagaaatacatagtcaatattgccacaatatggtctgctcagtctggggagcagtggctagtgatggagcagtaggggtaagttggggttggattgtcacagaccttgcatgttgtgctaaggcatgcagaggtttccaggcaagttttgacatgatcagattgcccttggtaacattataaagaagatgacaggtggctctgcaaagaactgtccagacgggggagctggactgagccacagttaagagactgttgcagtagactagactaggaggaggagaatttgaattagagcattggccttagcaaggggatcaaagagggaaaaagatgagattggtttgtaggctgaatgaatggaggtgaaggtaaagaaagagtcaataatttttggaagatagggtagatgacaaagttgtttaaagaaagcataaaagaaggggatttaatgacttaaatttttgatatagggaatataagtctgaaacatgggtctagccttgagctggaaatacagcttgggcagttagcaacatagagatggtagatgaagccacggatgcagatgtaattacctgtaggagtatcatggagaccttgatctagccaggacaatttcagggacagcccaggatttgagcaaaggacttgtccattgcttttattgagtctttcaaggttgatgatttattattgtttaaaaatatgagggagccatattatggttgttttaattatccttgtggatgggtatagtagaatgtcctaaatattaaaacatatagaattcatttataatgttatatcatttataatggttgtagctttattattatttttaataattaggacaaatgcttaatattttacattttagatcatagtatgagtcaatattcatgatgaatctttttctttgtatttctttcgaatttaagaaattagatcaaaattttctgatagagacgaaactttggaatgcagaaatatttttagtattggtgccaaaaatttaagtcacttactttaacacttagaaattacaagatcatatatggaaagtttgttattggtttggtgtattagaatcatttgtggagcttttaaggacaccaatgcagtgctggattccactcaagaggggtttgtgttagggccacatcatctgtattttttaaagctttgtggatattttgatgttaatctgagaaccctgtatcaggggtttgggtaggggctttgttagcatattttgtgtcttgcttatttagttaacctttttgtttaaagctgttaaagcaaaggccagaataccagcaggttagcgatttggtcatcacagtgaaaccatttgaattttcatgtgaatttaaactataaaacaaaattcaatagcagttcagtctgggcttgtatcattagagggctggttaaataaaatatgacttgttcacagagcagagtactatgtagctataaaagggaaggaggaatagctatgtactactgtgggggagaatatattgttaaatgaaaaaaaaaacaaaacccactgtagcagaacagtggtattgtacactgtcattttttaaagaaaggggatctataaatctataaatatatatttttgtgcatatatataaacacaccaatggaatgataaaccaaaaactaataaaaatgattaaggagagagagagaatggggtggataaaacagggatggaggctagacttctgaatgtactttattttgtggattacatttagaaccatgccaatgctttaccatattataaaataaaaataaattaaaatgagagaaaaaggcaatctctaaaaatcaagtgcatcctttcaaaaaaccagctcctggattcattaattttttgaagggttttttgtgtctctatttccttcagttctgctctgattttagttatttcttgccttctgctagcttttgaatgtgtttgctcttgcttttctagttcttttaattgtgatgttagggtgtcaattttggatctttcctgctttctcttgtgggcatttagtgctataaatttccctctacacactgctttgaatgtgtcccagagattctggtatgttgtgtctttgttctcgttggtttcaaagaacatctttatttctgccttcatttcgttatgtacccagtagtcattcaggagcaggttgttcagtttccatgtagttgagcagttttgagtgagagtcttaatcctggagttctagtttgattgcactgtggtctgagagatagtttgttataatttctgttcttttacatttgctgaggagagctttacttccaagtatgtggtcaattttggaataggtgtggtgtggtgctggaaaaaaatgtatattctgttgatttggggtagagagttctgtagatgtctattaggtccgcttggtgcagagctgagttcaattcctgtgtatccttgttgactttctgtctcgttgatctaatgttggtctaatgttgacagtggggtgttaaagtctcccattattaatgtgtgggagtctaagtctctttgtaggtcgctcaggacttgctttatgaatctgggtgctcctgtattgggtgcatatatatttaggatagttagctcttcttgttgaattgatccctttaccattatgtaatggccttctttgtctcttttgatctttgttggtttaaagtctgttttatcagagactaggattgcaacccctgccttttattgttttccatttgcttggtagatcttccaccatccttttattttgagcctatgtgtgtctctgcacgtgagatgggtttcctgaatacagcacactgatgggtcttgactctttatccaatttgccagtctgtgtcttttaattggagcatttagtccatttacatttaaagttaatattgttatgtgtgaatttgatcctgtcattatgatgttagctggttattttgctcgttagttgatgcagtttcttcctagtctcgatggtctttacattttggcatgattttgcagcggctggtaccggttgttcctttccatgtttagcacttccttcaggagctcttttagggcaggcctggtggtgacagaatctctcagcatttgcttgtctgtgaaggattttatttctccttcacttatgaagcttagtttggctggatatgaaattctggattgaaaattcttttctttaagattgttgaatattggcccccactctcttctggcttgtagagtttctgctgagagatcagctgttagtctgatgggcttccctttgtgggtaacccgacctttctctctggctgcccttaacattttttccttcatttcaactttggtgaatctgacaattatgtgtcttggagttgctcttttcgaggagtatctttgtggcgttctctgtatttcctgaatctgaatgttggcctgccttgctagattggggaagttctcctggataatatcctgcagagtgttttccaatttggttccattctccccgtcactttcaggtacaccaatcagacgtagacttggtcttttcacatagtcccatatttcttggaggctttgctcgtttctttttattcttttttctctaaacttcccttctcgcttcatttcattcatttcatcaacaaaattgataaactgctagcaagactaataaagaaaaaaagaagaatcaaatagacgcaataaaaaatcataaaggggatatcaccaccgatcccacagaaatacaaactaccatcagagaatactacaaacacctctacgcaaataaactagaaaatctagaacaaatggataaattcctcgacacatacaccctcccaagactaaaccaggaagaagttgaatctctgaatagaccaataacaggatctgaaattgtggcaataatcaatagcttaccaaccaaaaagagtccaggaccagatgaattcacagctgaattctaccagaggtacaaggaggaactggtaccattccttctgaaactattccagtcaatagaaaaagagggaatcctctctaactcattttatgaggccagcatcatcctgataccaaagccaggcagagacacaaccaaaaaagagaattttagaccaatatccttgataaacattgatgcagaaatcctcaataaaatactggcaaagcgaatccagcagcacatcaaaaagcttatccaccatgatcaagtgggcttcatccctgggatgcaaggctggttcaatatacgcaaatcaataaatgtaatccagcatataaacagaaccaaagacaaaaaccacatgattatctcaatagatgcagaaaaggcctttgacaaaattcaacagctcttcatgctaaaaactctcagtaaattaggtattgatgggacgtatttcaaaataataagagctatctatgacaaacccacagctaatatcatactgaataggcaaaaactggaagcattccctttgaaaactggcacaagtcagggatgccctctctcaccactcctattcaacatagtgttggaagttctggccagggcaattaggcaggagaaggaaataaagggtattcaattaggaaaagaggaagtcaaattgtccctgtttgcagatgacatgattgtatatctagaaaaccccatcgtctcagcccaaaatctccttaagctgataagcaacttcagcaaagtctcaggatacaaaatcaatgtacaaaaatcacaagcattcttatacaccaacaacagacaaacagagagccaaatcatgagtgaactcccattcacaattgcttcaaagagaataaaatacctaggaatccaacttacaagggaagtgaaggacctcttcaaggagaactacaaaccactgctcaaggaaataaaagaggatacaaacaaatggaagaacattccatgctcatgggtaggaagaatcaatatcgtgaaaatggccatactgcccaaggtaatttacagattcagtgccatccccatcaagctaccaatgactttcttcacagaattggaaaaaactactttaaagttcatatggaaccaaaaaagagcccgcatcgccaagtcaatcctaagccaaaagaacaaagctgtaggcatcacactacctgacttcaaactatactacaaggctacagtaaccaaaacagcatggtactggtaccaaaacagagatatagatcaatggaacagaacagagccctcagaaataacacctcatatctacaactatctgatctttgacaaacctgagaaaaacaagcattggggaaaggattccctatttaataaatggtgctgggaaaactggctagccatatgtagaaagctgaaactggatcccttccttacaccttatacaaaaatcaattcaagatggattaaagacttaaacgttagacctaaaaccataaaaaccctagaagaaaacctaggcattaccattcaggacgtaggcatgggcaaggacttcatctctaaaacaccaaaagcaatggcaacaaaagccagaattgacaaatgggatctaattaaactaaagagcttctgcacagcaaaagaaactaccatcagagtgaacaggcaacctacaaaatgggagaaaatttttgcaacctactcatctgacaaagggctaatatccagaatctacaatgaactcaaacaaatttacaaggaaaaacaaacaaccccatcaaaaagtgggcgaaggacatgaacagacacttctcaaaagaagacatttatgcagccaaaaaacacatgaaaaaatgctcaccatccctggccatcagagaaatgcaaatcaaaaccacaatgagataccatctcacaccagttagaatggcaatcattcaaaagtcaggaaacaacaggtgctggagaggatgtggagaaataggaacgcttttacactgttgatgggactgtaaactagttcaaccattgtggaagtcagtatggtgattcctcagggatctagaactagaaataccatttgacccagccatcccattactgggtatatacccaaaggactatataaatcatgctgctataaagacacatgcacacgtatgtttatagtggcactattcacaatagcaaagacttggaaccaacccaaatgtccaacaatgatagactggattaagaaaatgtggcacatatacaccatggaatactatgcagccataaaaaatgatgagttcatgtcctttgtagggacatggatgaaattggaaatcatcattctcagtaaactatcgcaagaacaaaaaaccaaacactgcatattctcactcataggtgggaattgaacagtgagaactcatgtacacaggaaggggaacatcacactctggggactgttgtggggtggggggaggggggagggatagcattgggagacatacctaatgctagatgacgagttagtgggtgcagcgcaccagcatggcacatgtatacatatgtaactaacttgcacattgtgcacatgtaccctaaaacttaaagtataatgataataaatttttaaaaaaatttaaaaaaataaaaataaaaatcaagtgcatatggaataagtgaatgtatattaagttatatataactaaacgtatatttacatttagttatatataactaaatgtatattaagtttgaggctgaagcacatgatctttcaaatgactttgaaacatagtaatttgattatacatttctagagggacatatcctcaaggacaaagaactgcaaaaatattgtaaactgtttttagtaatcgtataactggtattattggtattgttctggaagcatgcattgttaagtaaaacaaatggataattatattggattggtgctctggattttggtgtggaaaagaggagatacaaaggtagaaacagagaagttgttgattaaggatattgggaccataaatttgagttggagatgtccgtatgaactcatggtattttttctttattgaaaatgtattttctgtttttctctgctggaaaatcccagaaagcaacctaggtagcattgagcacttctaatgccagactctgttctgtaaatactaattcccactacaaggaacttagggtaccttagaaaaatggcttatttcatgttggggtcaagaatgctataagatgatcctgggacatctttttatatcacaaaacaggctactagggagattttcatttctatcagtggtagaatagctttttctaagccagtgctccaactgagaacaactagtagagaagctgggaaatattgttttaaaaatctgcttgaaggctttggaaagtgagcaaggcaaagaaagggactagagagaccaaaattttggagagaaggtaaactcaggggcgagggccaacttttggtacagcttttcccttggggggactggccgatttgagatgtgcggctaagagattgagcacaaagtaatggcagagagactgagattctaagcagagttttggtggttatgcagcatcgggggacacagttggatttcaggggctgcaaagaaagaaggggcgctggaaaatacctcaggcttttagttgggaaccctgaaggatgggctacaccctgtgcttaagggtgaactcaaaatagatcagctcttacaaaggctgaagcccagctttcacattacctcaatccctgattggattaaagagtctgctcctagctttattgtttgctagaagcaaatgtaaatctgtggaggaagacagcatcaagcattgcctcaagttattattataattactatgtataatattttacaacatgtaataaatatttacatagttatacaacttagtctggaattcaattaaaaaaagacctgaaaatttaaaaattggctgaaaatgaagagagaaaacagataattgaaacagactcatagggaggcttttattacaaataagatggtatagactcagttttcctgctcttccctgctaagtacaactctaaatcttggaattggtacaaaagacacccaaaggagaattcttgaagtttataagaagaaagtgaactgacttgggatcacagcattggaagaacaacatagtcgtagagcatcttgcatcctcccatccacctagacccggtgtttcctgaccctcccacctagcaacagagtgcaggctaggtaggttggctcattcctcccctgaatcaaatggaagtccccccgaaaacatctgccaaggccgacagcattgacaaaggggatcagttgggaactctagccctaatcttaaccctataagtggtgagaggaagcacattccttccttgcctgtcctgagatgtcccttttccactgaggcaggttggcagaactggtaagagagacccaactatagctagcagtccagtttgagaagactcttcttccctgtggatgtgagattttcctcttcagcccagagacaccagggtgggcactgcttgcaaaaaggacatagccacagcaaatggcctggtctgagagatctttggccatgtgggcctgagccttttctctcctacccagagatatgggcaggtaggtggaactggcaagagcaagtggcccattacagaagacctctttgtctctgtgggttcaaagcttgcctttttcactccagtgatactggggaagctaggagtaacctaggactaccacaccctcttccaccaagagacaactggcagcctggctcagggaacttctttaccctctcaggcagtgccagcagagaccaatgggagctcaaaggcactagataaacaaagcaggctaaataacactgcaaaggctctgtaaattagtctgctattggaacgatagcctagaaaagtagaccaagatactcgtgctaaaactaaacagggtggctaactgttaaaagatttaatagaagcctatgttagagacttctaacataatagacaaaatgttcatgatataatagcaaatcacttgtcataccatcaacaaaggaaaccacaaattgaatcagaaaagacaatcaacagtcaccaatacaagatgaatcagatgttggaattttctgacaaggattttaaagcatccatcataaaaatgcttcaaaatcaattaaaattatcctgaaacaaaagatataaaaatctcagcaaagagccatataaaattaattaaaactaaataaatgaaataaaaaagcaccaaaatggaaattttagaactgaaaaacaacaggaaaaaaaatgcttactggaccggctcaatagagtggcagtgacagaatcagtaaacttgaggaaggaactatagaattcacttaatatattggaagaaagcaaactgcaaaaaaaatgacttgtggggcaataacaaaagacttaatattcacgtaattggatttccagaggaagggagagtaagtaggtctaaaagagtgtttgaaagaaataatagtggaaatcttaccacctttggcaaaagaaacaaacctaaggacccaagaagctatgcgaacttggtacaggataaacccagtgaaacaccaagatacattataattaaactcttgaaacctaaaggcgaagagaaagtcttgaaagcagccagagagaaatgatgcattacctatagggaacaccaattcaaatggcagtagatttctcatctgaaaacatggaggccatctgaaatgttacattacctatagggaacaccagttcaaatgacagtagattttctgtatgaaaacacgaagaaggacaagacatgatatttttcaagtgcggaaataaaaggactgtcaatcgtgaatttctgtatctggtgaaattgtgcctcaggaactagaggaaaatagaaacattctcagataatggatacctaaagaatttgttgctagcagaacaacccttaaaattggctaaaggaagttctttaagccgaaaggaaatgatagtagaaggaatcttggagcattaggaaggaagaaggaacaatggaaaaatagaaatatgggtacataaaataatagactgtcgcaggccgggtgcagtgccaacgcctgtaatcccaacactttaggaggccgaggtgggtggatcacctgaggtcaggagttcaacaccagcctgaccaacatggtgaaacctcgtctctactaaaaaaaaaaaaaaaaaaaaaattagctaggtgtggtggcagatgcctgtaaccccagccacttgggagactgcggcaggagaatcgcttgaagctgggagggggaggttgcagtgagctgagattgtgccattgcactccagcctgggcaataagagtgaaactctgtcttaagataataataataataataataataataataataataataataataataatagactgcccctttcctcccaagtttcatcagtcctatttgatgatagaataaaaaatataaaaccatctaacactgaagatgatgatatttaaatcaagacaaaggacttaaatggaagtgaggtttccacactttgttcaaagtggtaaaatgttgttactaataagcagattattataagccgtatgtttatattgcagtaattgaagtaatcacttaaaactatacaaaaagataaactcaaaaacaatataaacaaatcaagctggaatccgtgatgattaattttacatatcaacttgactgggttaaggaggacctagatagcaggtaaagtattctttctgtgtgtatctgtgagggtgtttccagaagaggttggcacctgaatcagtgaactgagtaaagattacccctgcctaatatgggtggccaccatccaattgtttgagggcgtagatagaacaaaaaggcaaatctcatttctcttctggagctgtgacacctgtcttctcctctccttggaaatcggaactccaggctctctggccctcagacttcaggactagcacgagcagtctcccaggttcttggacctttggcctcagactgagttacaccaccagctcccttggttctcaggctttgggcttgtcctgcactgtgccattggcttccctggctctgcagcttgcagatagcctgtcgtgggacttctcagctcctgtaattgtgtgagccaatttccttaataaatcctctcccatatacccaatttgttctgtttttctggagaaccctaatataggactctaaaaaatgttcaagtgacctataagaaggcaagaagagaagaacaaaagaccgaggacttaagccttaatgtattgataattaacttgaacgtaaatggactaaatataccaatcaaaagacagagactggcagagtggatgaagaaacatgacccaactatatattgcttatagaaaagtcacttcaaattgaataatgtaggtagatagaaaaggatactaaattataccatgcaaacattgatttaataaaaaagcagaaatggctgtattaatatttgataaattagacttcagagcaaagacaactaccagagacaaagaagggcataatgataaaatgctacattaagcgttgccagggcacagggataggaggtatgctgattgtaaaagggcaatatggggaatccttatagtgttgaaactattcagtatcttgactgtggaggtagatccttgaatctatacaggtgacagaattgtatagacttgacacactgacacatacacatacacatacacatacacacacacacaaatgagtgcaagtaaaacagtagaaacctgaatgcagttgacttatcaatgtcaatattctggttgtgatactgtactgtagttttttaaaatgttgccatttagggaaactggtcaaagtgtacaaggaatctctctgtattgctccttataactgcatgtgagtctgctattatctcaattaaaatttcagttatttaagaaacagactcaaggagactaagaagacattaaaagtaaatgcactggcctggcatggtggctcatgctggtaatctcagcactttgggaggccgaggcaggtggatcacctgaggtcaggagttcgagaccagcctggccaacatggtgaaaccctgtctctactaaaaatacaaaaattagctgggcgtggtggcaggtgcctgtaatgccagctaattaggaggctgagacaggagaacaatttgaaccgaggaggcggaggctgcagtgagttgagatcattgccactgcactccagcctgggtgaccaagtgagactacatctcaaaaaaaaaaaaaaaagtaaaaatgcactgtggggttctggattggattttggaacagaccagaaaaggccattagtggacacacacacacacacatacacaagtcagtttttagaatgatcagaaatacactttaaaataaatgattagtatctttattagaatgatcagaaatagactttaaaataaatgattagtatctttaagaatttatataacaagatcaataatttcagtagagaaatagaaagtataaaaagaagcattggaaactagaaatacaataattgattttgaagagccttagaagagaattagttaactataagatatgttgggaaaaaatacctgtatagaagcacagagacaaaggaatgaaaaatactaggttggtgcaaaagtaaatgcggtttttgccgggaggttttgtttttttttttttaatggcaaaaaccacaattacttttgcaccaacctaatatttaataattggagttaaaggccgggcacattggctcatgcctgtaatcccagcattttgggaggccgaggtgggtggatcatgaggtcaggagttcaagatcagcctggccaagatagtgaaaccctgtctctactaaaaaatacaaaaaaaatttagccgggcatggtggtgggtgcctgtaatcccagctacttgggaggctgaggcagagaattgtttaaacccgggaggcggaggatgcggtgaaccgagatcgcgccactgcactccagcctgcgacagagcgaaactccgtctcaaaaaaaaaaaaaaaattggagtcaaaaaatggcaaaaactgcaattacttttgcacataccgaaaagagtttgaatgatgtgggacacagttgtaattagaactccaaaaggagaaaaaaagagtggagcagaagcaatacttaatgagataatgtcctagaatgttcacaaagtgataagatgcttaaagctgccaattcaggaaatgcaacaaacaccaaacaggatgaggaaggaaaagcatactcagcatttttgctaacaaccaaagacaaagttaaaaatatttttttttttttttttttttttgagacagagtcttgctctgttgccaggctggatctcggctcactgcaacctccacctcccaggttcaagcaattctcctgcctcagcttcctgaatagctgggactacaggcgcgccaccacgctcagctaatttttgtatttttagtgaaatacgaaaattagttttagcgaaacggggtttcaccatgttggccaggatggtctcgatctcttgacctcgtgatccacccgtctcggcctcccaaagtgctaggattacagacatgagccaccgcgcctggtgaaagttaaaaatcttaaagcaaccagtggattgagacacattatctttacacaagcaagaaaaaggctgggcgtgatggctcatacctgtaatcccagtactttgggaggctgaggcgggatgattccttgagcccaggagttttgagaccagcctggtaacatagtgagaccttgtctcagttttaaaaatttattttcttattaaaaaaaaaaaagcaaggacaagactgaaaactaccttcttattataaacaatggaaacccaaacaatggaatgacagttttaaagtgcagaaaagaaaataaatgccagcatagaattgtataccaagagttgacaaactttctttttaaagggccaggtagtatatatcttagactcctgggccatgtaagatctctgccacagctattctgcattgttgcatgaaagcagtcataaacaatcataagcgaatgggcatggctgtgttccaataaaaccttacttacagaaacaggctactagtccacgggctgtagttccctacccttctatatccagtagaaaatatacttcaaaaatgaagaactaaagatattttcagatgaacaaatacagaggggattaatcaccggcagccttacagtaaagggagttccgtaagcagaggagaatgactgcagaaggaaatacagagattctaagaggaatgaggagcagtggaaagaataaagtgtgggtaaacttaactgaatgttaattgtatgcaataataatgtcctctgggatttagaatatagaattgaaatatacaccaacaaagcacaagcagctggtataggtggatggaagaagtgaagcttaaggtccttgaattgcccaggaaatggtataagtactaatttatattaggccttgataaatcagggatgcaagttataatttctagggtaatcactaatagtagtaaaagtaaaggtaatagcaaaataaaagtaaatagtaaaaggatgcataacataatagtttataaagaaaaaaatggaataataagaatatttaatccaaaaaaaggtaaaacaagataggaaaaggaacatagagtaagtaggcagatagaaaacaaatagcgagacagtagatttaatgccagttatgtcagcactggaatgaaaactgactcaagataccagttcaatgacagatttgtctaagtgggtttaggaaaaccaatgaactatgatacaaaactgtacttaactgtaatgagtcaaatattgaaagcaaaaggatagagaaaaaggtatatcacactcttaacccacagacagctggtttatgtctatatctgacaaaatagacttaagaaggattgctagaggcaaaatagtaacgtttcataatgatgaaagcacagtctaccagaaaaaatgattctaaatgtgtgtgtacctaataatgtaaccttatgttatataaagtgaaagatgtcagaggtacatgttaacaattttttttttttttttggagacaggagtcttgctctgtcgcccaggctggagtgcagtggtgtgatctcggctcactgcaacctccagcccctaggttcaagtgattcgtctgcctcagcctcagcctcccgagtagctgggaccacaggtgtgcaccaccatgcccggctaatttttgtatttttagtagaggtggggttttgccacgttggccaggctggtcttgacctcctgacctcaagctatccacctgccttggcctcccaaagtgctgagattacaggtgtgagccaccacgcccagccacaaattttttatttgtaaataattttaagctcacagaaaagtgcaagaataaaaacagtgcaaagcacaactttgtattctacccaaattcattgttaacatctcactacatttgctttatcattcctcacccctccctccacataagcacacatacacagatatgtgtgtgtatacataatttttccctctgaacctttcaagggtaaactatatatatcgtggctcttgacccaaaatactttagtatgtattttctgagaatagtgatagtcttaagagtcttaaggtacagtttttaccttcaatatatttgacattgtacaatgctttaatctactgtttgtgtttcattctgtcagttgacctgcaatgtcctttgtgtaattttcaacgtgcagtacaggatccagtctagggttaggtattgcatttgattgccacactttaatctagaacagaggtcaacaaacattttctttacagggcctgatagtaaatattgttggctttgtctgtgtcatagatctctgtcacatctaatcacctctgctgttgtagagagaagcagccattgactataagtatgtgaaaggatacagctgtgtttcaggaaaactttatctgtataagcagacagcaggcctgatttggcctggcagctgtagtttgccggtccctgatttagaatatttgtactgcctttctttttctttattttttgttttttaatgatattgacattctttgattaatacattccccctcttttaatccagttccttattttgcgtttgttttgttttcccatcattagattcaagttacgaatccttgaccaaaatactgcataggtgaaggggtgttcttcttagatctggaggcatacgttgcccatctgtctgatttttttaatgttgattttattctcctgtttgaggtgctgtcttatttttccactatataattactatttttttcctatttgcaatcaataagcagtctgtggggagatgctttaagaccatgcacatatgctgctgctcatcagaatttccttctactttttagcatccactgctaatgggaaaagtaattttaatactctctcagtagttcgtagaacaaaaagatttgaaaacacttggcctaattgacatatacagaacattgcactatatagtttctgtatacttctaaatattcatgaatcaaagaagaaatcaccttggaaatttgaaaatgttttgagtggaatggcgatgaaagtattatctgtcaaacctttgagatacagctaatggcattctgagaattaaaattgtagctttaaatgcatacattaaaaaagaaaggtgaatatctaagttttcaactccaagtagaaaaagcactgtacaatatgttcctaaagggaagaaaacaataaagataaattagttgaatataaaacaggtacagaagcgaggattaacaaagacaaacattagaaaagactaataaaactgatcaactgctggagagattgataaaggcaaaaagaaaacaaatgactggtatcagtaataggaaaggggagatcacggtagatcttaacagacactgacaaaatcaggaggattttttttagtaggttttttttttaatataagctacattttcagtttgttttgttgtataatttttaaactatatggcacaacacagtaaatactcataggaggtcgagaaactatacaagaaacaattggaataaatctggtagattgtttctatttagacattaactctgtttatcatttgaggaattctccatagttgtaccagaggtgattgattattaaatctattaattagatacaaaatactaatatgttctgttcaaaagaagtcagcaaggcgtagttatcacacagatcaacaacgaagaaagacatgttttaggacatttgaaaaaatcacacgtagcttattttcttgacaatcttaatcatgacaaaacctgggtttcactgactagatatgaaatgtgtggggcatttgtttactacatgtttaagcatggttagaactacaatctgaaaaatgttttaattgtacagccttataattatttcaatctaaatatcagaggagttaataacatcaattaatttcaaaattatgcttctgtttttgtgaggccaagtataaactgtttttggcaaaaagaaaagctagttttacctgactttttttttttttggaaggcctgcactgggttatgtgttcttttttcttttatatatatatatatatatatattttttttttttattatactttaagttctagggtacatgtgcacaacatgcaggtttgttacatacgtatacatgtgccatgttggtgtgctgcacccattaacttgtcatttaacattaggtatatctcctaatgctatccctcccccctccccccacgccacaacaggccccagggtgtgatgttccccttcctgtgtccaggtgttctcattgttcaattcccacctatgagtgagaacatgctgtgtttggttttttgtccttgcgatagtttgctgagaatgatggtttccagcttcatccatgtccctacaaaggacatgaactcatcattttttatggctgcatagtattccacagtgtatatgtgccacattttcttaatccagtctatcattgttggacatttgggttggttccaagtctttgctattgtgagtagtgcctcaataaacatacgtgtgcatgtgtctttgtagcagcatgatttatattcctttgggtatatacccagtaatgggatggctgggtcaaatggtatttctagttctagatccctgaggaatcgccacactgacttccacaatggttgagctagtttacagtcccaccaacagtataaaagtgttcctatttctccacatcctctccagcacccgttgtttcctgactttttaatgatcgccattctaactggtgtgagatgatatctcatggtggttttgatttgcatttctctgatggccagtgatgatgagcattttttcacgtgtctgttggctgcataaatgtcttcttttgagaagtgtctgttcatatcctttgcccactttttgatggggttgtttgtttttttcttgtaaatttgtttgagttctttgtagattctggatattagccctttgtcagatgagtaggttgcaaaaattttctcccattctgtaggtttcctgttcactctgatggtagtttcttttgctgtgcagaagctctttagtttaattagatcccatttgtcaattttagcttttgttaccattgctttcggtgttttagtcatgaagtccttgcccatgcctgtgtcctgaatggtattgcctaggttctcttctagggtttttatggttttaggtctaacatttaagtctttaatccatcttgaattaatttttgtataaagtgtaaggaagggatccagtttcagctttctacatatggctagccagttttcccagcaccatttgttaaataggaaatcctttccccatttcttgtttttgtcaggtttgtcaaagatcagatagttgtagatgtgtggtattatttctgaaggctctgttctgttccgttggtctaaatctctgttttggtaccagtaccatgctgttttggttactgtagccttgtagtatagtctgaagtcaggtagtgtgatgcctccagctttgttcttttggcttaggattgacttggcgatgtgggctcttttttggttccatatgaactttaaagtagttttttccaattctgtgaagaaagtcattggcagcttgatggggatggtattgaatctataaattacctttttcaccatattgattcttctatccatgagcatggaatgttcttccatttgtttgtgccctcttttatttcgttgagcagtggtttgtagttctccttgaagaggtccttcacgtcccttgtaagttggattcctaggtattttattctctttgaagcaattgtgaatgggagttcactcatgatttggctctctgtttgtctgttattggtgtataagaatgcttgtgatttttgcacattgattttgtatcctgagagtttgctgaagttgcttatcagcttaaggagattttgggctgagacgatggggttttctagatatacaatcatgtcatctgacaagccccagtgagatgaacctggtacctcagttggaaatgcagaaatcacccatcttctgtgtcgctcatgctgggagctgtagactggagctgttcctattcagccatcttggaaccaccctcaggaggatattattaatgactattccaatacattgaaaattttagatgacatggcaaatttctagaaaaaccaacttataaaaagaaaactccatgtccagaaagcttcaccagtcaattcttcccaactattataggtatttcaccaatgttacagactcttccagagcataggaaaataggtgaaattctattcttgttttcatacagccagcatcattttgttataaaaacctgaaagaaaaggaaaacagcaagtcagtctgtcttatgaacatagatggaaaaaatgtaaacagaatatttgcagactgtgtttagtgaaatactgagataatcatgaccaagtgggtttatttgagaaatttaaggttgatttaatatttgaaaatcagtatcattcgcaacatttacagtataaatgattattttagtagatagataattttaaaaaatagaattcaatacgttaatgataaaaacctttaacaaactaggaatggaaaatacttccttggctgggtgaggtgactcatgcctgtaatcctaacactttgggaggctgaggtgggaagattgcttgaggccaggagtttgagaccaccgtgggcaacatagtgagactgtctctacaaaaatgacaaaattatccaggcatggtggtgtgtgcctctagtcccagctgttggggaggctgaagtgggaggatcgcttgagcccggttggttgaggccgcagtgagccatgatcccaccactgcattccagccttggtgacaaagcaagacactgtctcaaaaaaataaaagaaaaaaagatacttccttaatatattaggagcttgtacaaagaatttaggataactatcacactgtgtggggaaatactgaaagcttttccctgagattgggaataagacaggatacttccatcacaagttcttttcattttcagtattgtaatgaacgtctaaaacagctgcagtaaggcaagaaaagtaataaagtgataaatgttagaaaggaaaaatagaattttttaaacagatgttatgcttgcattattcctagtttttacttggaataatcaggagaatggtgttaccattctagagatgaaaatttggtggttaaaaatgtatataggtggtatgtaaagctttgagacagtgtgagatcacctacctagtgaattaggcagagaaacaggctttaggtagagaagcgaggctactttttagagattgggaaggcaggtagatttactaaagtgaactgagaagaagctgccagggaatccagagtggagggttttggggaccaagtgaaaagggttttaagaagagagttactagctttttgaatgctgtgagatttaccttatgtaccttaataaagggatttcagaggagggtaagggttaaagtccagttggagttggttaagaaatttggtgagagcattgagtcaaagtagacaactttcaacaagattttttatataaaagtgagaagagaagtagacagtagcctgaagaatatgagcagaagggggtttgtttttttagaagagaatgcaacagctcttctgtaagctgatccagcagaaggtaaaagtattgggtgaaagttagaattaggtttggtctggtgatgcccttgattgggtggagtttgagaattctggacccaggtagacgatgcaactctgaatgggcttaaaccatttatcctttgtaactagaggagaggcatagtacgtgcatttagtcatgggaaaaaaatatatagttctctcctcattagttattctttctacaactattcactgagtgccattagaatgccaggcatacttttaggcactggaaatagtcaacagaacaggcaaaaatccatgctgttgtgaagtttacattgcactggaagaaagtagatatgaaacaagtaagatatcagctaattatcagctaaaattgaagagagggaagaaggtttagcaaattgagagaaaataaggtgtaaaaagtgaattgaccagggaaatgaattattgattgacccacagtgcggagagtctgtatgagatgtgtgtttataagtgtgaaaagagaccaaatagcataatattttgtctctagccttatctagctgcttgttggtatataagagtaagcagagagttgggcttctccaggtttagagttgccatacgtataactgcagcttaccaaggtgccattgagtgtaaaatgcactcttattttgtgaactgagaaaaaacactgtcatttaaactgtggcatgccatagattttataatatatcctgatttctgagctattagttttaaaattgttcattttagaattagtaaaataagtagttgggatacttttgattggaaacaacagaaaacccaaactcagatgcactttaataataaggaggagccaagggggatatgaagaaaatggcagcctgaatgaggcctgcttccttgactccctcagctacctactagctctctggttctcttgagccagcctgctgcggggccctacagaaaactgtaggatctggttttctgttcttgtgttagtttgctgagaatgatggtttccagcttcacccatgtccctgcaaaggacatgaactcatccttttttatggctgtgtagcattccatggtgtatatgtgccacattttctttatccagtctatcattgatgggcatttgggttggttccaagtctttgctattgtgaacagtgccataataaacatacatgtgcatgtgcctttacagtagaatgaattataatcctttgggtatatacccagtaatgggattgttgggtcaaatggtatttctggttctagatctttgaggaatcgccacactgtcttccacaacggttgaactaatttacactcccaacagtgtaaaagcgttcctatttctccatgtcctccccagcatctgttgtttcctgtaatctgtctaccttttaagtttaaattccccatgaaaaaagagttttaaaagttatgccatagaaaaagattaatagcacgagaaaaggctaattattaggtttaaaaaataggttacatataatatgtacaatattatctccactttaaaaaaaatctatttatccatgcataggaaaaaactactaagccatacaccaaagtgcatatgtggttatcattaggaatcataagtttaaataatttgagaattctttttactttttctccattttccaaattttctgcactgaccatgcagaaaccattgcaatgaccattgcttttacaatgagaaccagaaaagccttttaaaaattaaacaaaatttttgggaggccaaggagggtggatcacctgaggtcacaagttcgagaccagcctggccaacatggtgaaaccccgtctctactataagtataaaaattagccaggtgtagtggtgggcacctgtaatcccagctacttgggaggctgaggcaagagaattgcttgaacccaggagacggaggttgcagtcagccaacacggtgccactgcactccagcctgggtgatgaagtgagactccgtctcaaacataaaaaaaaaaattaaacaaatttttaacaactcagcaggcttagtctgctttctttcacagtctgcattttttgggccctggagccccaggagtcttcgtagcttcccactcaggttaagatacagcacatatttccagcttctacaggtggcctctttgcacatagaatcgtgacctttattttcaacatctgaagcattgctacttatctatattgattaacttagctgagttctcctctaccatctaattagatttggtttcttcacagtggagcacaggctatcttcagtgtgttctgtacatacaagcaactttataaccatctttgtatccatactttgttagactggtttttgtgttgtgggaatgactgattcactaagatgtccaggatgttggcaatccagttgagggacgtggtataacgggacccagcactgcattcgaatttcatccttggacaagacaagtaacttctctgaccccaaatttctaccggttgctcccctgcctgcaggctccgtgcttggtatctcagaaaaccttcccgaggaaaaagcccataagggacaagtcccggcccaacttaaaatcacattatgctatgtgaaaaaagccaaacacgaaaagacacatggttgtatgattccatttatataaaatgtctggaataagcaaatccatagagatagaaggtagactaatgcttgctggcagggagtgactgctaacgtcccaaattagatagtgcagatgtttgttcaactctgtgaaacatactaaaagtcacttgtacacttcaaaagagtaagtcttacggaatgtgaattaaagctcaataaaactcttattaaaaagtagataaaagggttaataatctctctactgaacaattatcccccataatgaatcctgtttcatctgtactcctacccaccttctcccccatattattttaaagcagcatattatttcatttataaatatttcagtagtttgggtacttaaaaaatacataaccacaatagtattatcatgcctaaaaaatttaacatgtaataaaatattcagtcagtgctcaactttctaatcatgtttttagactgcttagcattttgttgtggagatggatcataatatatttaaccagttcctgttgatgaagcttgaggttatttctaactttccaactgataaatagtgcttcaataaacatccttatatataaaaaaaaaaaaaagaaagaaaactgtaggatctggttctgtagtgatccttccaagcagagagaactggtgtatagctggccattgtagcaagaggcaaggaccatgaagctgcagatcctggaagatgggacatagcacccatttatgtagtgtgtatgtaggccttcttgatctctacaaggccagtgtattgctgaatggttgggcagagtcttaacctgtgcttgaggctgaagcagtactgggagatctgagaacggagaagattcctataggttaacacacagtgtactcagagcctgtctgcttgaatacatccatgtgagactggctttccaaattttaaattaaaaatctagaacatttaaagagagttaaatgtactttttcaaacaaataactttctggagctgaaatctatgatttcctcattaaacaattcagtacatgaattaaaagaggggcagtgcaagaaatttttggagagcaaatgtataaagatagaaatcatgaaagcaaagaaacttggaggagaaatttgagatgtccaaaatttgaataatatgacttccagaaggagagaaagaaacagatggaagaaaagactacgtattgtgtacagtgtacactgcttgaatgatgatgggtgcactaaaatctcagaggtcaccgctaaagaacccatctgtgtaaccagaaactatctgtatctccacaactattgaaatgaaaagaaaagaaaagaaaaaggaaacggatggatgtggcagtaagccacaggagaaaaaaagacaggtatcacatttcaaatttgaacactgtagctaaaaagcagtggattagcatctagagctactgagagaaaaatgactgcaatccaagaataccatatccagccaaggtatttatctgtacaggtaaaagaaagatgtttaaggatctatataaattcagagtataccactcaagtatcctatttgaggcaaataaatgaagcagaacagagactataaaattgaagaagagagtgaagagcggtgaacagtgaacttgtttttatgtttaaaattatatcgtaatggatgaggttgggctgggaatatataagtgctacattagacctctttaatagaatggacataaggaaaagttttgaatgagtattgagctgtctctgcaaaatataggaattaggatgctctgcagaaaaaaatgtgccaaaggtgtcatagagtagagagggaagggaaaggaagaaagggtagatgtatcttaggagtctcatttttggggttgggaataggaaaggagtgggtaagtgtggagtatttttgtaggggaaatgtttgacatcttgtttataaattatagtaaagacatatgctttcaacagtgaaaggcaggaaagggaagataaccattgataagatggaaaagttcagtagtatttccaggtaaagggggaaatgaaatgaatgacaacttttttctttttttctttttgagacagaatcttgctctgtcacccaggctggagtgcagtggtgggatcttggctcagtgttacctccgcctcctgggttcaaatgattcttgtgcctcagactcaagagtacttgggattataggagtgtgccaccatgcccagataattttttggtagttttagtagagatggagtttcgccattttggccaggctggtctcgaactcctggcctcaagtgatctgcctgcctcagcctcccaaagtgctgcgattacaggcatgagccagcgtacctggcctgcacgccaactttatcacactagtaaaataaggaaaaagaaaagagagcaatgtaaataagcaacaaacaaaatatagatggaaagaacaaaattaatatttaggtcatctactaaatgtgaataaattatgtagtctcatgaaaagaaaactggagtggctatattaagatcgaagtcgacttcatgtgaattaacacaggaacagaaaatgaaacaccgcatgttcttgtaagtgggagctaaacaatgaatacatgtggacacaaagatgggaacaatagacagggggtactacttgagaggggaggttgggaggcggggttgggttgaaaaactacctattaggtactatgcgtacacacaggtcaaaggagaaataagggaaatcagaaaaaaacattttggaatgaatgaaggtgtatgcaaagtattaggtactttgcatacaaaggattctttgtacatcaaacctcggcaacacgcaatttacgcatgcaacaaacctgcacacatacccctgaatctaaaataaaagtcaagagaaaaaaaaaacccaaaaacaaagtagatttcacacaaacaaggaatattaacagagatagaaatatttcataaagacaaacatgtaaattcttcaagaagacagaacagtcctgcatttgtaggtgtttagcaacagagttctaaaatacatgaagtacaaatggtcagaactaaaatgggaaatgtgcaaatccacaattatagttgcagatttcaacatttgcctttcaatatcaataaaacaagtatacagaaaaataagaaggttatagaagacttgaataacactgtcaattaacttgacataattggtacttagagaacatgatacatatcaactgcagattacacattgaagtgcccttggaacattcagtaaaatagactatatgctggataatagaacaagtctcaatacatttaaaagatttgaaaccatatgtcatgtgttctgttttgaagacagggtctcgcttgctctgtcacccaggctgaagtgttgggattgtagctcactgcagcctctatctctgggctcaaatgattctctcacctcagcctcctgagtagctgggactacaggtacactctaccacattcagctaattttttttttttttaatttttagtagagatgaggtctcactatgttgcctaggctggtcttaaattcctggcctcaagtgattcatccactttggcctcccaaaatgctagggttatagacgtgagccagagtttctgtggaattgcaatagaaatcattaacaaaaagataactagaaaaattcccccaaacatttggaaattaagcaacatctaaattacacataggtcaaaggagaaataagggaaattagaaaaacattttggaatgaatgaaagtgtaaacacagtctgttacatttgtggaatgcagctaaagcagtatatagagaggaatttgtacctgcaaaagtttttattagaaaagagaaaagatgtaaatgttctaaatttccatagccagactacctctctagattccttctctctgggcagggcatctctgaaagaaaggcagcatccccagtcaggggcttatagataaaactcccatcttcctgggacagagcacctgggggaatgggcatctgtgggcacagcttcagctgacttaaacattcctgcctgccggctctgaagagagcagcagatctcccagcacaccactcgagctctgctaagggacagactgcctcctcaagtgggtccctgacccccgtgcctcctgactaggagacacctcccatcaggggtcgacagacagctcatacaggagagctccagctgacatctggtggatacccctctgggatgaagcttccagaggaaggaacaggtggtaatctttgctgatctgcagcctccagtggtgatacccaggcaaatagggtctggagtggacctccagcaaactccagcagacctgcagcagaggggcctgttagaacaaaaactaacaaacagaaaggaataggatcaccatcaacaaaaaggacgtccatacagaaaccccatccaaaggtcaccaacatcaaagaccaaaggtagataaatccacgaagataaagaaaaaccagcgcaaaaaggctgaaaattccaaaaacaagaacgcctcttcttctccagaggatcacaactcctcgccagcaagggaacaaaactggatggagaatgagtttgatgaattaacagaagtaggcttcagaaggtgggtaataacaaactcctccaagctaaagaagcatgttctaacccaatgcaaggaagctaagaaccttgaaaaaaggttagggcaattgctaactagaataaccagtttagagaagaatgtgaaagagctgatggagctgaaaaacaaagcacaagaactttgtgaagcatacacaagtatcaatagccaaatcgatcaagcagaagaaagcatatcagagattgaagatcaacttaatgaaataaagcatgaagacaagattagagaaaaaagaatgaaaaaggaacaaacaaagcctccaagaaatatgggactatgtgaaaagaccaaacctgcgtttgattggtgtacctgaaagtgatggggagaatggaaccaagttggaaaacactcttcaggatattttccaggagaacttccccaacctagcaagacaggccaacattcaaattcaggaaatacagagaacaccacaaagatactccttgagaagagcaaccccaagacatataatcgtcagattcaccaaggttgaaatgaaggaaaaagtgttaagggcagccagagagaaagactgagttaccctcaaagggtagcctatcagactaacagcagatctctcagcagaaaccctacaagccagaagagagtgggggccaatattcaacattcttaaagaaaagaattttcaacccagaatttcatatccagccaaactaagcttcataagtgaaggagaaataaaattatttacagacaagcaattgctgagatattttgtcatcaccaggcctgccttacaagagctcctgaaggaagctctaaatatggaaaggaaaaccagtaccagccactgtaaaaacataccaaattgtaaagaccattgacactatgaagaaactgcatcaactaatgggcaaaataaccagctagcatcataatgacaagatcagattcacacataacaatattagccttaagtgtaaatgccccaattaaaagacacagactgacaaattggataaagagtcaagacccatcggtgtgctgtatttaggagacccaactcatgtgcaaagacacacataggctcaaaacaaagggatggaggagtatttaccaagcaaatggaagccaaaaaaaaaaaaaaagcaggggttgcaatcctagtatctgataaaacagacttcaaaccaacaaagatcaaaaaagacaaagaaggacattacataatgttaaagagatcaatgcaacaagaagagctagctatgctaaatatatatgcacccaatacaggagcacccagattcgtaaagcaagtctttagagacctacaaagacacttacactcccacgcaataatagtgggagactttaacaccccactgtcaatatcagacagatcaatgagacagaaaattaacaaggatattcaggacttgaactcagctctggaccaacaggacctaatagacatctaccgaactctccacccccaagcaacagaatatacattcttctcagcaccacatggcacttgtcctaaaattgaccacataattggaagtaaaacactcctcagcaaatgcaaaagaatagaaatcataacgtccctcagaccacagtgcaatcaaattagaactcaggattaagaaactcagaactgcacaactacatggaaactgaacaaccttctcctgaatgactactgggtaaataacgaaattaaggcagaaataaataagttctttgaaaccagtgagaacaaagacacgacataccagaatctctgggacgcagccaaagcagtgtttagagggaaatttatagcactaaatgcccacaggagaaagcaggaaagatctaaaatcgacaccctaacatcacagttaaaagaactagagaagcaagagcaaacaaattcaaaagctagcagacaagaaataattaagatcagagcagaactaaaggagatagagacatgaaaaacccttcaaaaaatcagtgaatccaggagctgttttttgaaaagattaagaaaatagactgctagcttgactaacaaagaagaaaagagagaagaatcaaatagacacaataaaaaatgataaaggggatatcaccactgatcccaaagaaatagaaactgccatcagagaatactataaacaactctacgcaaataaactagaaaatctagaagaaatggatacattcctgaacacatacaccctcccaagactaaacgagggaaaagttgaatccctgaacagactaataacgagttctgaaattgaggcagtaattgatagcctatcaaccaaaaaaaagcccaggcccagacagattcacagccgaattctaccagaggtacaaagaggagctggtaccattccttctgaaacaattccaaacgacagaaaaagagggacttccccctaactcatttgatgaggccagcatcatcctgacaccaaaacctggcagagacacaacaaaaaaagaaaatttcaggccaatatccttgataagcatcgatgcgagaatcctcaataaaatactggcacaccgaatccagcagcacatctaaaagcttatccaccacaatcgagttggcttcatccctgggatgcaagatgggttcaacataacggaaatcaataaacgtaatccatcacataaacagaaccaatgacaaaaacacatgattatctcaatagatgcagaaaaggccttcaataaaattcaacagctcttcatgctaaaaactctaaataaactaggtattggtggaacttatctcaagataataagagctatgtatgacagacccacagccaatatcatactgaatgggaaaaagctggaaccattccctttgaaaactggcacaagacaaggatgccctctctcaccactcctattcaacctaatatggaagttttggccagggcaatcagacaagagaaagaaataaagggtattcaagtaggaagagagaaagtcaaattatctctgtttgcagatgacatgattgtatatttagaaagccccatcgtctcagccccaaatctccttaagctgataagcaacttcagcaaagtctcaggatacaaaatcagtgtgcaaaaatcacaagcattcctatacatcaataatagactgtgcaaaaattacaagcactcctatacataataatagacaaactcatgagagccaaataacgagtgaactcccattcacaattgctacaaagagaataaaatacctaggaatccaacttacaagggatgtgaaggacctcttcaagaactacaaaccactgctcaaggaaataagagaggacacaaatggaaaacattccatgctcatggataggaagagtcaatatagtgaaaatggccatattgctgaaagtaatttatagattcaatactatccccatcaagctaccattgactttcttcacagaattagaaaaaactactttaaatttcatatggagccaaaaaagagcccatataaccaagacagccccaagcaaaaagaacaaagctggaggcatcttgctacctgacttcaaactatactacaaggctacagtaaccaaaacagcatgataccaaaacagatatatagaccaatggaacagaacagaggcctcagaaataacgccacacatctgcaaccatctgatctttgagaaacctgacaaaaacaaacaatggggaaaggattccctatttaataaatggtgtcgggaaaactggctagccatatgcagaaaactgaaactggaccccttccttataccttatacaaaaattaattgaagatggattaaagacttaaacgtaagacctaaaaccataaaaaccctagaagaaaacctaggcaataccattcaggagataggtatgggcaaagacttcatgactaaaacaccaaaggcaaaggcaacaaaagccaaaattgacaaatgggatctaattaaactaaagagcttctgcacagcaaaagaaactatcatcagagtgaacaggcaacctacagaatgggagaaaatttttgcaatctatccatctgacaaaggactaatacccagaatctacaaagaccaaatttacaagaaaaaaagcaaacaaccccatcaaaaagtgggcaaaggatatgaacagacacttctcaaaagaagacatttatgcagccaaaaaacatgaaaaaaagttaatcatcactggtcattagagaaatgcaagtcaaaaccacaatgagataccatctcccaccagttagaacggtgatcattaaaaaggcaggaaacaacagatgctggagaggatgtggagaaataggaacgcttttacactgttggtaggagtgtaaataagttcaatcattgtggaagacagtggggtgactcaaggttctagaaccagaaataccatttgacccagcaatcccattactgggtgtatacccaaaggattataaatcattctgctgtaaagacacatgcacacatatgtttattgcagcactactcacaatagcaaagacttggaaccaacccaaatgcccatcgatgatagactggataaagaaaatgtggcacatatacaccatggaatactgtgcagccatagaaacaaatgagttcatgtcctttgcagggacatgatgaggctggaaaccaccattctcagcaaactatcacaggaacaaaaccaaacattgcatgttttcactcataagtgggagttgaacagttagaacacatgaacacagggaggggaacatcgcatactggggcctgttgggagggtggggggctaggggagggacagcattaggagaaatacctaatgtagatgacggcttgatgggtgcggcaaaccaccatggcacgtgtgtacctgtgtaacaaacctacatgttctgcacatgtatcccagaacttaaagtataaaaacaaacaaaaaaaccagaaggccgggcgtggtggctcacacctgtaatcccagcattttgggatgctgaggtgggtagatcacgagatcaggagttcaaaccagcctggccaagatggtgaaaccccgtctctactaaaaatagaaaaattagccgggcatggtggtgggcgcctgtaatcccagctactcaggaggctgaggcagagaattgctggaacccaggaggcggaggttgcagttgaccgagattgcgccattgcactccagcctgggcaacagggcgaaactccgtctcaaaaaaaaaaaatgtggtacatatactccgtggaatactaccacctgtaaaaatgaatgcagttgtgtcctttgagcagcatggatgcagggaggccattattctaagtgaattaatgcagtaacagaaaaccaaataccacatactctcacttacaagtaggaactaatcattgagtacacatggacacaagggagcaacagacaccgggacctgcttgagggtggagagtgggaggagagtaaggattgaaaaactgcctttcaggtattacgctgattacttgggtgatggaattatctgtacatcaaacccctgtgaaacctgcacatggaccccttgaacctaaaataaaagttagaaaaaagggcaaaaataataacaagcacattacaaaataatatgtgcagatgatcagtaaacaccagaaagggtactcagaatcttttttatcttatttttttgagacagtttctccctctgtcatccaagctgcagtacagtggcaccatcttggctcatggcaacctctgcttcctgggctcaagcaatccttctaccttaacctcccaagtagctgggactacaggcgcataccaccacacttggctaagttttttgtgtttttgtagagactaggtttcactatgttgcttaggctggtcttgaactcctgggcttaaatgatccacctgccttggcctcccaaagtgctgagattatagacataagccactgtgcccagcctctgaaaatctttaaatatcagaaaaatacaaatttataccataatgagatagaatagtgcatacctactggaataagcaataaaaagtctgattataccaaatgtgggaactgatgtggaataagtagaactctcatatcttgaaaatgtgattgtaaggtggaaacagtttggcagtttcttaaaaatttaagtgcatatctatactttaatccagtgatttcattttgtatatttattcaagagaaatgtagatacctgtccacagaaagatttatacgtgtcttaacttcatttataaaagcctataattacgtaatccaagtgtccaccaataaacaagttgtgtattttcatacaagagaatactactcagcagtgtgaaggagcaaactattgatacaatacttagaaaagttatgttgataaaaagaagcaagacacaaaagtgtctttgattccattaagtcaaattctgtaaaactgatctatagtgggaaagataagatcaatgtttgaggtggaggttgggagagattacctggagagggatataagagagcttttgggggtgaggaaactgttttatatcctgtttgaggagattacactttgtgtatacatttgtcaaagcttatcaaattgtacacatcagtggctgcattttattatatgtaaattacttttcactaagattgattaaagatttggttggaaggaatcaaattggtatagcagtcactaaactaaatgcaaacagattatatattgtggcagtaaaatactgtcaggttagtttaagaaacaaaacctaaccaagtcctgtttcgaagaagcaaactattgaaaacttgataagtaaagctgaaaataaaagagttgaataaagatgtaagatacaggaaaataaccaaaagatcaataattataataatattagacaaggtgaaatttaaatatcaaactaggtaagtggattgttaacatcataaaaggcatattttatgaaaatccaatagccataatcttgtatggctaaaaagcttaacacataaagcaaaaataatctgagtagtgtggtagagcaggcatggtatgagatttatatatatatataatatatatattaaaaaattatatattatatatatatgtttttttcttttggagacagagttttgctctttctcccaggctggagtgaagtggtgcgatctcagctcactgcagcctctgccccacaggttcaagcgattctcctccctcagcctcccgagtagctgggattataggcacttgccaccatgcctggctaatttttttttcttttttttttttgtatttttagtagagatgggtttttgccacgttggctaggctggtctcaaactcccgacctcgtgatccacccacctcagcctcccaaagtgctggggattacaggtgtgagccactacgcctggccaggatttcagtacatgtttatcagaattaggtctagtagatgaaaatacgagtataaggaattgaatagtgcatttaataatcttaatcatatgtgtatagaaatagtgttttaaattcctggaatagatctttttttaatgtccaaggaactgtggtcaaagtttaatgtccaaggtacttgaccataaagaaaatcttaacagatgagaaaagttgagattttataggctgcgttgtctggtaataatactggtaaagtagaaagaaataactatgagacgagtcctttgaaacctgcctcctgttcccctattctccctatatttgtttccactgcagaattacctcagtattcttgaactaagaaattggtggtggcaaggtctttattcttcatattttagccttacattattgaaatgcctttcagtttgatgcctttgtgtgactgccagtgaactaggttttcctagtgtacaggtgttgcccatgcccacacctagattatcaatgatactgtaaaacttgacctgaaattttaggttgatattcctggcctttctctttcaaattcctttaaacttttagtaaccacttgttggccatttattagaacacagggaattttgaattaaaaactcacataatttaaaagaaacaggaacacctagtgctgagaggatgtggggaatagcatattctcatacattgctggtgcaaatgtgaattgttacagccttttggaaaataatttgacagcttggttaacaattaaaattcatattccttttggcctagtatacctcctcctaagatttctactcttagacataaaagcccaagtaaggccatatgtatagggatatttattgcagtgatgtgcatattgtcagtcaactgaaaacaaaatgaacattagtagggaaaggcaggaaaaagtgatacctccataggtgggatactatgctacataaagaaaaaataaattagactaataccagattagtttgagaaatttccgtaaggttttgttgagtgagcaaagaaagatgcagaaaagtatataataatttgtgtaaccaaaaaataatttaagagaaccatgcctatatcataggctcatgagtatgaagaaaagtatttaagaattcctggtaggtggttaaatgtttaccttggtcaagggtgggtcagagtaactggggaagtgggttaaaacaacaacaacaacaacaacaacaagattcgtctgtgatcatatctatgcattatctgtaaaattatataaatatgtatgtttaaagatactaagtaaacatttaaaataaaactgacctgtttcccagcctggacaacatagcaagactcatctctaaaaaacaaaattaattaaaataaattagctaggcatagtggtgtgtgcctgtagtctcagctactccagaggctttggtaggaggatcacctaagcccaggagtttgaggctggagtgagccattgagcttgccactgcactccagcctgggtgtcagtgtgagattctgtctcaaaaacaaaaaacaaaaaacacaaatatttgttttataaaactgatgctgatttgcaaacctaagtgttcacgtgaagtccactgaaactcttaggagcagaagcagcatagtggagagccataaaaccttttatattaggccccaagacaaagaatcaaggaagtgtgtacacacacacggaataaaacaataaccagtgggaaatttacctaagaaactagaagcctagagtaaggtggtttttgtgggtggttgatactgtttttcagggactttgcattcctttgatttgtcattcttggtgttggctttgtgttcaggcatagcacaggcgttgtgttcaggctgtagtacttccagctgtaaaatccagctatagcaaagtccagatagagaagaatggtctcttcttggatgtttatcataggttgttttttaaaaagcatttgctaaggctgagtttgggttacaacttgattatagtattgtagaggaaggtgttattggaaggaaaagcataattaggcaaaggaagaagttgagctccaatgcaggcctgacaaaggggaactgtgggggcaggattgcttatttgagttgtcccatgttggattgaaatgcttgggcctttatactctttttttttttgagacagagtctcactctgtcgcccaggctggagtgcagtggcgcgatcttggctcactgcaagctctgcctcctgggttcacgctattctcctgcctcaacctcccgagtagctgggactacaggcgcccaccaccacgcccagctaattttttgtaattttagtagagacggggtttcactgtgttagccaggatggtctcgatctcctgacctcgtgatccacccgccttggcctcccaaagtgctgggattacaggcgtgagccaccacgcccagcctatggtatgggcctcttcatggtgtgggctgccatgggaagggcatgacctgtagcaaggcagcccctgaaggaattgatgttctgctgaccacattccctgctgctgctggcagcaagtccttccttgaagaggagatctaggtggcatgtctccctgtccacacactttcctaagaataagaaaatatttcctggaaatcatccatcagatgtgccctcacatctaagtattagattacattctgtgtcagagattcatggttacacatcatagcctttttctacttctctagtaaaaagaattctgattttttgatgggtacatgatcatctgggataacggctgcatttttcagccttcctctacttgtagacatgtcagtaacttctggctaatcgaatgtaagttgaattttcatgtgtgacttaacagagggagagagggtgtacccccccgttttcttttcctccttcctgctgggtagaatttgggtataatagctggagcttgagccgctatcttggattatgaggtagaagccacatgttggggatgacagagcaatagtatagaacagcattaggtccctgatgatcatggaaatgcattgcatgctctggattgcttatctttgggttttttttatcttggtggttagtccattactatttaggtttttctgacagttgcattaaagcctaatcttttttctacatctatatctatatatgatgtatatctatatctatatagatacatattcttttttaaaaatagatatgagggtgttgctgtgttggccagcctgatcttgaactcatggcctcaagcagtcctcctgcctcagcctccaaactgctgtgatttcaggcaagagccaccatgcctggtccacacctaattttaattgatacagatttctaatcagtcagtggcaaggggcatgggaaaacatgattggcttcgactaacattttggggtggaatggattttggggagtagggcatggatacatctctatcaggcaagtacagcagaggaagagaaaggcaagaacatcagggagtttgcaggatatgattctcgtgatggattatggagtcttaactaggtatgtgagaaaatgaaatgtgtggatggtaggtggtgaacagtgaagaaatgatagttcaatggattggtggtctccatggggccaaagtctcattggaaagggggaataaactggagagatgagatagtagtcagaggtcagggtgctttttttgtggtaatgttgttactggtaatagcaagggccagagaaggggatggctaaagaggggtggaggaaaagatagttaatggtgaggttaagaaatggagagactggattttggatggaacatcttagatgttgatgcagatgagtggaagagagtgaacgatttgttaatatctttagtgcattaggagtagctgggagatgactcagaaggtaagggaggcagatccagaagcgagcatgtgttcagagtggctgatgttaatgaaagagggaagaaaaatatctggaaacagccatgatgaaggaaatagcgtccttcttaaatattaaacatttttatatagtaacagatacttgctggtggcagtgctcatgcctgtaaacccagcattttgggaggccaagataggaggattgcttgaggccagaagttcaagcgtgggcaacatcgtgagactctgtttctacaaaaaataaatttaagaaatttatcgctgggtgtgagggctcaagcctgtaattctggtgctttgggaagccgagatgggaggatcttttgaggccaggaatttgagaccagcgtgggcaacatagcgagacctgtctttaccaaaaggaaaaaggatgacataaaattaagataagatttaggtatgttttgttcattcctgttggttttaatatttttctgtcttcttttttaatgtatgcaataagtatttgtttcatctaaatttatgcaatctgaatataactagtcattttctactggttatagtgtttgttaatgtacccattatgtttaatttgtattatattaagaattaagaaatattaatatatgaaaatatataaaatatataaaaatatatgaaattaatatagcagacttaagttttctttcttgatttaaattacagactaactggatcttctgggtttgtgacagatggacctggaaattataaatacaaaacgaagtgcacgtggctcattgaaggacagtaagtagaaatggctgacttaatttttgtttttttagcatagaagtcagtgtgacattagttttcccacaagtaaaattaacaatctgtagcataaagttcttaaaacattacttgataacctttcatttgacaagtgaattttatcttagccttcattaatttaaaagtttcatgttgatttaatgctgcaaatgaattgtacacaccacaaatttgtgtatttccaactgtaatagttcagaaacggttacacacacacacacacacacacacacacacacacacacatatatatttatttatttttatgggacagagttttgctcttgtcacccaggctggagtgcagtggcgtgatctccgctcactgcaacctccgcctcccaggttcaagcgattctcctgactcagctcctgagcagctaggattacaggtgcatgccaccacgccaggctaattttgtatttttagtagagaaggggtttcaccatgttaaccaggatggtctcgaactcctgacctcaagtgatccgctcgcctcagccttccaaagtgctgggattacaggtgtgagccactgcgcccagccacggttccatatttttaatggtttgcttaaagcattagaaaattgcaatattgtgttatttttctaagtatctatttttgttgtggataagaaaattgtaataactgttattgcctaaatgatcccttctctggacccactgtgtccctctggctgttggccttttttctccttgtcttcatgggagacttttaaagcagtacttctcagacttttttggtctcaggacctctttacacttttaaactttgaggattccaaataagtttatttattatttatttatttatttattttgagatgtcatctcgctctgtggcccaggctggagtgcagtggtgtgatcttggctcactgcaacgtctgcctcctgggttcaagcgattctcctgcctcagccttccaagtagctgggattacaggcatgtgccaccatgcccagctaagtttttgtatcttgtagtagagacagggtttcaccatgttggccaggctggtctcgaactcctgacctcaagtgatccgcctgccttggccacacaaagtgctgggattacaggagtgagccactgcacccggccccaaataagtttatgtttttctatttgtgttcaccatattagaacttacaaccaagaaatattatttattcatttaaaagcaacaattataagccatgttagtacaaatgatattttaatgaaaaaaaccctatatttaaaaaattgtagtgaaaaaatggcattgttttacatttttgcaaatctctttaatgtgtagcttaataaaagacagctggattgtcatatcttctgcattcactttgttgcagtatgttattgtggttgaagcgtgtcaagaagatgaggcctcacttgaatatgaagtaggaaaaaagagattttaatagtacagtattttaaaattattgtatatagtcttctttgataccatatcaaaacttaacaagtagtaatttcttaaaagtaaattgcagtatggaatctgaaactatgttaaggaacttttggtacttgttaaattaaaatccattggttttcttgcactgaatggatcttttgcccatccatattttggtaacatgatatataggtcatttggaaaacaacaggtcattgaattatgcagatcttccatatgttgatatatttattccattacataatattttaaaaatcacattggttagtatccccatcaatctcctcaaaaagttctaagtatggcagttaacaaattttccaaaattctaattactacttgaaagcttgtattttatctttggcagcaaatactgtcagttgttttctttgaagtggcaggcttgctttcctcatttttaagaaaatgtctgccagatatccaactctgaataaccgtagtttattgattgttctttcaagtaaacatggtaaatggtgttctaagaaaaaagtagctagttcagctagcaacttaaacagttgcaaaagtggttttcattgagaaaaccactgtgcttctattaagcaaaagaagtgttttatatatttttttcttgtttttttttttacatttttttattttatttttttattatacttcaagttctagggtacatgtgcacaacgtgcaggtttgttacatatgtatacatgtgccatgttggtgtgctgcacccattaactcatcatttacattaggtatatcccctaatgctatccctccccactccccccaccccacgacaaaccccggtgtgtgatgttccccttcctatgtccaagtgttctcattgtcctattcccacctataagtgagaacatgtggtgtttggttttctgtccctgcaatagtttgctgagaatgatggtttccagcttcatccatgtccctacaaaggacatgaactcatccttttttatggctgcatagtattccatggtgtatatgtgcctcattttctttattttattttattttattttatttttttattattatttttttcatttcttttttttattttttaatttttttattatactttaagttttagggtacatgtgcacattgtgcaggttagttacatatgtatacatgtgccatgctggtgcactgcacccactaactcgtcatctagcattaggtatatctcccaatgctatccctcccccctccccccacctatttactctccatcttgtcagaatattaaagagatgtctactaactggtgaggatttaataacattagaagtttttaactgcttaatcaagatatccttaaatgaaactggcagcttttcttttttctatgagtggttcgtggtgaagaatagcagtgatcactagtaccatttgctgctgctgtcttgatttgttctaagatgcccacagtttcacccaccatttctccttgaaccattagtaaatgccagcatggttataaaatatatgctatcttagttttactgtgaatatagttttgacctcctgggacctcccataagggtctcagggcctgtagcattttgtggacttcattttgagaactgctgctctaaggagctctgctgtgtcctatcagttcattgccacctgacaccctcctccactgtttttctgaatgtgctctcaatggttgttcctcctcagtgtaagtgaaaaactaagcaacaaactctcattcccccttttccttattccctacatttagcctgtcagtaagttctgtcagttttccctttggaatgtctccccaatccatcaccagactgcttttcacctccatctctacagctgggagacccaccatcgtctctctcctgggccacttaatagccttgaaattggcctcctgagttctgcttttgccccttgcccacctcccacttctcatctcttaaggttttctctgtttgctgtgtttcagatatgctgattttcttcatgttgcttggacacatcagcctctttctcccttaagactgtgctgttccctccgtctgaaacgtttttcccagcacttttcacatggcttgtctcttgtcattctcacatctccaaagcttactggcctatctccctacgactttttgcactgccacatcaccttcttttaatttcttcacagtactcatcaccatctgagtttacttgtttatgtatttatttagttgtcaacctagagatgttagaaaagtgtggggtataggaaagttctaaactggagaaatagaattaggcatcagcaggatataatgatgttgatattcccagagctttctgagtggagtgttgggctgaagccaggctagagagtgaaggggtgagtgagatagagtcactggaggaagcaaagtcttctgcgaagttttacctttttaggaggagaaagggtagggcaggtatttggtagagggagagttgggatttgaggctttttgtttttatttttgtaaaatatgtgatacttaagcagatttgaatgtggatgcaaaagttccagatgagagggagatgtcaaatacttgagaaacagaaagagaaacagaaagagaattttggaaaatgggaattttagggtttttttatctggttgctgagcataagcagggaggtgggactgggtggtttgaaatagtcgttgagagtagcagttgtggagagggagagagaattggtaggactgctggcagaatctaagtgccatttgcagttggagagcagagaccattgctggaaccagtctacccagtggtgtggtatagaagtttggctttcttcaatacagcttagttttgttttttttttccctccaccgccccctcccactttttttttcctggttcaatcttagagcagataactggtttcctgtacaacagagcttttgccagccagtgtcctgaaaaatcagaggggctggcaaatttagaggattggcaggcatgtttatgaaatgacgtagtgtggaatctgaagttgaatgaggaagtgcagaaatggaagggctaatgggttggttcagaagctgttaaagagtggccactgaatggactgtaaggcccagaatcatggaccacatcagttttgtttcccattgcatgtttagtagtctcttgtacttggagaatactaaataaatctttgacaaatgaaggaatactggtggggcagttgttagactgtgttacatattattaatttaaaaatctgaatttttatattctcaaatgtctgatagttgtgataactttattataaattactttttttattcttttcaggccaaatagaataatgagacttcgtttcaatcattttgctacagagtgtagttgggaccatttatatgtttatgatggggactcaatttatgcaccgctagttgctgcatttaggtaagctcagtcttacaagccttctttcatcgtttgatttctaaatttaaacatatcttctggattgcattcttactgggttcacctttattatcacttaacacatttatttaatggaaagaatactagttcttcagtcccatcacttgtgtgttagtgctaacttggtttctgtagccctgggtaagtttctaggcatagtacttgacttctcttttcagtgccctgatctgtaaaattgtgatagttctattaagttcacctgctccttgtggtggtggtgaagtttatcattacaaaatgttttgagagtgatatattgaatgatactatttctgtgaaaaatttaaatcaggaataatatccatcatgttccttgtgtattgcccactgcataggccttcaggagttatttgttgaattcaaatataattgtgtgcgtgtgtgtgtgtgtatgtgcatcatgagtgagggaaactttttggaacagtacatataaaatgaacagtggctacctgtggagaaatgaggaacatacttattatatatattttttttcaataagtacatttacattagtagttaaacagaagcagtttaacaccaaatatatggactgttctgaattgtttgggtgttttacttttgattagcagcaagtagctgtgttgtttattatgtttttggccacattggaattcaaaactatctctagttttcttccttttacatgatagaggatttttttttttttttttttgagacggagtctcgctctgtcgcccaggctggaatgcagtggcgcgatctcggctcactgcaagctccgcctcccgggttcacgccattctcctgcctcagcctcccgagtagctgggactacaggcgcccgctaccacgcccggctaattttttgtatttttagtagagacggggtttcaccgtgttagccaggatggtctcgatctcctgacctcgtgatccgcccgcctcggcctcccaaagtgctgggattacaggcgtgagccaccgcgcccggcctagaggattttaagatacagtcatgtgtcacttagcagcaggaataggttttgagaaatgtgttattagatgatttcatcattatgtaaacattatagggtatattcatacaaatagatggtatagcctactgtacaccctgcttatatggtacagcctattgtacctaggccacaaatctgtacagcatcttactgtactgaatactgtaggtaattgtaacccaatggtaagtatttgtatatctaaacatatctatacatggaaaggtacagaaaaaatacagtattacaatctcatgcaacctctgtcatatatgtggtccattgttgaccatatgtcattatgtggtgtatgactgtatattttcctaaaatgcatttccccttaggaaaccatagttttcagtttttcacctgcaactggctttctaaatttctttgtctcaaacattttatttcctttactttaaaaagaaatcagttcaacaaatattttttgtgtttctcacatggggctcatctggctgatgtcccatgtggatgagggaggtaacagagagcaaacagtacacaaggacaggagatcaggcgactgttgtgccctcgtgtttttctacccgctttggcttagaaatctctctgacatatctttgaactgagaaccaaggccattttctgtgtttagaggttcacttacaaggccaaagagcagggtggatggctgtgctgagcatttaaaatggcattggccaagtgttggagtgtatatgtttatgccagcatttgaaacataacttgtagcaaaaagcaccccagaccttaatacaagccccaaaactaagtgtgatgttatcataatagtacttgttggggattcacttgttactgtgtttgttaatcagaattcacagagctcttgttgtatgccaggcactttgaatcagcttatcaggagccttgtaggaacatgagccaagcaggtatacatcactctgtggttcacctggactgtgtatttgataaacagtggtagcggtggtagagcagagagagtggttgagaaaattcttcaaaagaacattattccttttagagtttttttttttttttaggaaagttatatgctggtggggcagttgttagactgtgtgatctagaggaacccttccccttcccccttccacctccccttcccctttctccttccccttctcccttccccttcccccttcccccttccccttttccttcccttccccttccccttcccttttccttttctttctcccccaggctggagtgcagaggcaggaacgtagctcactgcagcctcaacctcctgggctcaagagatgctcccacctcagcctccccagtagctgggaccacaaaaatgcaacactatgcccagctaatttttgtattttttttttttttttttgtagagacggggtctcaccatgttgcccgggctggtcttgaactcctgggctcaagcagtcctcccaccttggcctcccaaagtgttgggattacaggtgtgagccactgcacccggccgaagattgcttttgacatacctgtttccaggtggccctgatcttgtcagtacttattccttctgcatttcaagggattctggtgtatataaccagtgaaagcctgatgatggttaacccttcatttacatctccaatcaaatgtcacctcttctaagaggccttcctttcaccctttctaaagtagcaccttctgttctttccctctgctctctttcccttcatagcatttgtctctacctggcattacgtatacacacacctgtgtggggagtatctgggcttatctgttgtttttctaatgtgaactacatgaaggcagggacatagtcttattcactgttgtattcctggtacctagaacagtgactcacatgtagtaagtgcttagtaaatatttgttagttgaatacatagtagaaaatgcatcactgttttgtaactcctggagcaccagagtttcagagttcctagagttctgtcttcatattaaaaattgaagggcgaggcgtggtggctcacacctgtaatcccagcactttgggaggccgaggtgggcggattgcctgaggttaggagttcaagaccagtctggccaacatggtgaaaccccgtctctactaaaaatacaaaaaaaatcatctgggcatggtggggtgcgcctgtaatcctagctactgaggaggctgaggcaggggaattgcttaaaccagggaggtggaggttgcggtgagccgagattgtgccactgcactccagcctaggtgacagaacaagactcggtctcaagaaaaaaaaaaaaaatgaatgaagggccaggcacagtggctcaggcctgtaaccccaacactttgtgaggccgaggcaggagaattacttgatcccaggagttcaagaccagcctgggcaacagggtgagacctcatctgtacaaaaagtcttaaaaattaaccagccatggtggtgtgtgcctgtagtcccagtcactcaggaggctgaggtgggaagatttcttgagcccaggaggtcaagactgcagtgagctgtgatcatgccactgcactctagcttgggctagaccttgggtctagctagaccttgggtgagaccttgtctcaaaacaaagcaaaacaaaaggaacgaaaatcccttcccctcctcattttcattccttgcttatggattcttccagccatttttgtatgcatttatataggtatgtgtaagtgtacacatgtacggtccattgttttgcagcttgcttctcccccatgcccttatcagaatgcctgttgagcttcttgttagtcccgcagacctaggtaatatgcagtgactcatgcagtcagatttctgggcatgagcatttagatgggtttcaacctgttgccatctgaacagtgctgtggttcgcattcttgtatattggtcatcgtgtacatgagcaagtatttcttctacaaagaaatagaattgctaggtcagagtgaatgagcatgaggttgtgtgtctgggacagattgcgtagggcctggcaaggatataggcttttaccaaatgtggtggtggtggtggtggtggtggtgaatcaataatggggcaaaaatcatggacatatgaagaaatgcaacagcaggtagacataagaaaaacaattaacctcaggagtaaaaagaactcagaaccacaatttaaaaattgctttttacttattaaattaacaaaattaaaatagaactagtagtccttgctgttggcagagtgaagtgggatggacccttcattctgtattgatacgatttcaaatcacatatctcttctggaaagcaagttggtattatggctctagagtcttaaaggcatcatttagacccttttactcagtaaggtttttttttttttttttaccagtcacacaacaaacatttagaatccgtcatgtgctgggttgtgagtgaggtcttaagaagaacctagggagcttttaatgatatagaaaatgcgttaagttttatttgtaaaatggaatatacaatgtaaataacatcaattaggctaagaaaatgcatcagaatactaacagtgttggagttatgggtgtttgtttagcttcttcgtattcttatataaatattttatataaaatatcttgggcacaatggctcacgcctgtagtccctacattttgggaggccgaggtgggtggatcacctgaggtcaggagttcaagaccagcctggcctacatgatgaaatgctgtctctactaaaactataaaaaattagctgggcatggtggtgggcacctgtaatcccagctactcaggaggctgatgcaggagaatcgcttgaaccccgggacgcagagattgtactgagattgcaccactgcactccagcctgggcaacaagagcgaaactctgtctcaaaaaaaaaaaaaaaaacaacaaaaacctcatgtctttcagcaatatatgtgtggtattcatcactcataaaatttgttactttatgtgattgtggaggtttattttttcaaagaagcagtataaaaagttttataagaaaaagaatagggccattgatttcaaatctcattagaaatacaactcagaataaaggaagcctagcaaaagattcagatctgttcctcaaggatccagaactgatagggtagcactgtgtgtttatcacaggaatttgcctgtcttcctggatgtggtttttaaattttaaggacggatttgtttttaatttctgtctgctacaatttgacatgtctgtgcttgtgcttccctctataagaagtgtgttttcatttcagtggcctcattgttcctgagagagatggcaatgagactgtccctgaggttgttgccacatcaggttatgccttgctgcatttttttagtgatgctgcttataatttgactggatttaatattacttacaggtaagatacttaagtctagtatttgtgatttcattcaggagactatctactatgttttaacaacaataatggctaacatagattgagagccaggcatagcgtcaggcagtttacatggattttctcatttaaaattcttccataaattcagtgaggtctgggctctgtttttctgcttatttataattgaggaaactggcaggaaaaggttagtagattgtcaaagtaactggtgggaccacaatttaaacccaggtgttgatgctgttgaacttctagaagagagggacttttctgctaatggacaaaaacgttggaattttacaaagtacagctccacaaatattagtagttgtcatgtactcgatagtagaagaaatctatactcattaaagtaccttgatagtccatttatccccccttttaaattctgaattacattgtttcaaagcactgtcagtacaattatattattatgagatgcgttatagttcaactgttttttttttttttttttttgagacggagtctcactctgtcacctgggctggagtgcagtggcatgatctcggatcactgcaacctccacctcctgggttcaagcaattctcctgcctcagcctcttgagtaactgggattacaggcacccaccacttcgcccagctaattttttgcatatttagtagagacggggtttcaccatgttggccaggctggtcttgaactcctgacctcgtgattcgccaacctcggcctcccaaagtgttgagattacagccgtgagccactgcgcctggccatagttcaattcttacattaagttaaactagcctgccttcttccatctgaaatgagtagataaaattactaaggaattttaaatataccaatctgggcagtaaccttaaattctattaaatacaaattttcagagagtgtacagaggaatatgtaccatgaggatggtagtttattgttggcagtttgttttattcttttccttcccagacttccaagcatgaattcagcaactctgtaaagctcatcattaggaggctaccaagaagaataggatagtcctcccacccatgaggagctaacagttctgcacaaatctcctacctcctttaatttctttgactttatgagttatttattcttatcctcttattatgagaatccagcagggttgatttgatttcattacttgtacctcgggctctagctatgcagtgttgagcaaacccatttggactgaatccttaagtactgcagttacacttgtgaatgaactgagacagtgagattcttaaacttgtgtgggaggaagttatgctaagttaatggaagcgttgcgttgtgttaatgtaattttccctgctatttttacagttttgatatgtgtccaaataactgctcaggccgaggagagtgtaagatcagtaatagcagcgatactgttgaatgtgaatgttctgaaaactggaaaggtgaagcatgtgacattcctcactgtacagacaactgtggttttcctcatcgaggcatctgcaattcaagtgatgtcagaggatgctcctgcttctcagactggcagggtaggagcttctttcatttttattttttcttccatttatagaacattcccactaaataaattatagattgactttattcttagcacctatataatttatattaatcaaatacgaggtagcatttaagcttgaaacatccctctatctagctgcttatgaatttcggtttcatacatgtgtggtcatggtctttagaattatggagggttggccattttttgcatcctgtgtgtgaaagttggagaacttggactcagtcataaaaggatgtagcagagagccaagctgggagatgggacaagagctgacaataatgatatttcctcagaaacacactctaagttcagagaaaattggtgtcagttatacattagaatcttaaaggagttagctaatagttatctacagaaataattaaagaagctttagggaattatttaaggggtgagtgataataactgttattaatttggtgatttttcttgtaaacttaccccttcctcagaacctttttactttgaaaggaaatatgctggtttaaataccttagtttgttgggtttggctgacattttagagttaataattgaagaatttcagtatctaccattgtgcaaatattgcagcagaagccaaacctcccaagaatggagtctgtttcttcaatttgtttaagttttttgatttaccagaagatggatagtttgtatgattgctcccgggtctagttatcaaacttattcctccatatccacaagttctgcatctacaaattcaaacaaccatgtgtagaaaatattcaggaaaaaaacacaataaaagataatacaggctgggtgtggtggctcatgcctgtaatcccagcactttgggaggccaaggcaggcggctcactgaggtcaggagttcgagaccagcttggccaacatggtgaaaccctgtctctactaaaaaatacaaaaattaggtgggcatggtggcaggcacctgtaatcccagctacttgggaggctgaggcaggagaatgtcttgaaccctggaggtggaggttgcagtgagccgagatcataccactgcactccaacatggataacagagccagactccatctcaaaaaaaaaaaaaaaaaaaagataatacaaataaaagatacgcatatgaaaacaaccatttacatagcatttacattgtgttaagtattataagtaatctagaggtgagttagagtatatggcaggatgtgtgtaggttatatgcaagtgttacatcactagtttatattagggaccttgagcatctgtggattttggtaccaagggcatcctggaaccagtcccctgtggatattgagggataactgtatattttatccttaagatttttcatgtgagttaattatttatttatctgtgctttctcctgagagttgcttaagcaggtatttcattaccaaaaaaaccctaacctggatatagtcaagtcatcattagaaagtatgtgatttacccttggtcaataccctgaataaattaaaataacaaattaaaggatttgtctgatatttaaatgctaaaggaaagactattatttaaatatttgttacatttagataattaaaacttgaaatgcagtaagctttaaagctgtcttttgtgaagctaattcattatgtttttattaggtcctggatgttcagttcctgtaccagctaaccagtcattttggactcgagaggaatattctaacttaaagctccccagagcatctcataaagctgtggtcaatggaaacattatgtgggttgttggaggatatatgttcaaccactcagattataacatggttctagcgtaagtcgttttaaacatttttgcaagaagcttagttttttattttgaaaatttataaagcacagataagcaaaaataaatcaccagtcattctactacctaaagaaaatccctgttaatattttggtagtagtctttcaaagtgttttgacatatgttgagtttttaaaattgaatgctacaaaaaattcattgtcatgataagcattcacctcttttcaaatactgtctctgatgttttgctttaagtatatgtagtaagttctatataagtaggggattattttatcttttaatttaattaatagttccaaggtcaaatggtttgaatttatagtttgctagtggaaattataccattgtctactatgtcccaggcttcaaggtctatttgctaatctcgtgctgctcattttgaagggagaatatgtgttgtcatagtggaattagctatggaggtggacttgtagaaaaaaatttataaacatttaatcttgctgattttattacctggaacttttttctaggcattttctattaatgaagattgtcaaaaaacccagcatctgttcattaagggattctggaaatatggcagtggtggcctagtttctgcatccccccaaacatagtcattaaaacacatcacacaactagtctagcaaaatcagagaaacatgagcaacatctataataaaacttggtcaggctaggcgcagtggctcacgcctataaccccagcactttcagaggctgaggctggcggatcacttgagatcaggagtttgagaccagcctggccaacaggataaaaccccatctctactaaaaatacaaaaattagccaggtgcggtggccggcacctgtagtctcagctgctcaggaggctgagatgggagaattgcttgaacctgggagacagaggttgaagatcagatggttgtaggtgtgaagccttatttctgggctctccattctgttccattggtctatgtatctgtttttgtactagtgccatgctgttactgttactgttactgtagcccaggagtatagtttgaagtcgggtaacctgttgcctccagcttcgttctttttgtgtaggattgaactggcccaatctctattcccattgctgctgcctttgttcgagccctttaatttctgatgagactcctgcagtggtcaggtcaggttagtagatttcctccaggttcttttctttccccatacatagattcaaactattttctttgcctggaaaacaaatgctttcctgaatatgaatttaaagtcacatcttattacagtttttaggtacacagattttaggcattttcatgtttttcatcagaagagctgtttgccagccctaggagtggcacaggtggcacccagagatctcgtaggagattggatctctacagagcttttcttacacatcccccttccctctggggggaaagagacctgtcagggtctattctttcttggctggacaacccagaggaagccccagagttgttcaggggctcatgctctttccagactctacctcagcaagtcatttgtgtgggcacctcttagactgtgtcattatcaataactgcagcccctccataatctcatttctaaacgttccacattccaccctgcttcttctgtggtggacactgttggtgccttgcccagatctgtttatctttacctggctggtgcagtgcacccagtcacctgatgctgtgcaatttggctgttgtcagttcatagctgaccctttctctgaagaattctctcagcagattggagctgtcttacccaggaacacctagaatactatgctctatccccaggatgtcccctagtgtagtgaccaaccagtttgcctggaactctcccagttttagcactgagtcttgtatcccaagaaacccctcagtactggacgaaatgggatggtcaccctggcccccagctgctgactggctggatggaggtacatgagtctgaccctgcttctacatgggaaaattcatgttccagggctccccttgggatcaggccaaagctatacttcaactgagaccacctttttacttatcctctccttcctactaccttgcttgtctcacttcctgatgtttgtcaaaagagtattccctcagtaaatcacttgtacaggaatctctatctccagctctgcttgcagggaatcttacctgagacacttttcaatcttttcagatatttctctctaataccctaacagtgtttgatctccacatgggtccataattcattgattctttctctctccctctcctgttctccttcttaactctaatatcttcttttcatttttcagattcctaccacctttccttctgttttcattctcagttaatggccttgcttcctgcttctcttttgaaagataaaggtcagaaaatgatttccacaaactcctaccaccacatttccccttcacctatatctgtgcccctttatggtcatcttttctgtagatcagtgctgtctcatagaagtttcaggcatcattcaaatgttctgtatttaccctgttgtatcactggccacatgtggttatttcatacctgaaatatggctagtgtgacttaggagctgaattttttattttccattcttagttcttatcttacttgatctggcaccaacatttgatacagttatccttccctcctcttttaaacactttctttagttggcttctaggacaccacatccccttgatattttttttaattccatattccttctcagcctctttagctggtttctcttcagctgactgacttctgaatgatgtcagaccagggcttaacccttggtccattgctgcctgtttattcactcttttggtgacctcatatagtatcttggcctttatacttggtgactctcaaatttgtatttgcagcctagactttttacctgatcccctatctccagctctttaattgacatctcaaccttctggctgtgtactaggcatcttatgctcagcatgtcccacactcatctttttctcaaggctgctcttcccccagatgtcccccccagttaatggccactccatccttctatttacttaaggcagaaatcttgggtcatctgtgacttcttgtttcttcacaccccgtattggtatatttatgagttatctcatgctacataacaaattaccacaaacttagcaccttaaaacagtttgcatttattatcaccatttcagttggtcaggagtcctctgtaatcaaggtgtcagctggcctgcattctcatctagaggcctgagtgaggaagaattcatttccaagctcacttaggttgctggcagaatcaatttccttgtagttatagaaccgagggtcccagctttctgctggctattgacttgaggctgtccttaatttacggaggctgccttcagctcctagagcttacctcagttcctagaggccacccagtttcttgtcagctgagcttcaccagtatagctgcttacttcatcaggccacaagaagagtctctagactgagtctgctagcaggatggatgtcacagaaatgatatcctatcatcttcgccatattctgtttgttaaaagcaagtcatagatcctgcttacctcctaggggaggggattgtacatggttatgaataccaggaggtggacatcatgaggactaccccagtgtctgtctgacacgataggtcatatcttgttagctctacctttagaatctgtcccaaatctgatcacctctagtgctgccaccatgagaagagaaggtaaaattaaaggcatgaaagtgattgtgccttctgctgttatactagatgttatgaaagacacatatttaccattatgtgattttaccctaacatcctccctgtctcttgaagcaagaaatctgggaatctttagatatttccatatgttcttctcttcgtaccataatttcatattaagccctctcaactctgtcaccaaatacatgtcatatttattctttttatgtacagcctgctgttatctcttacttagtcttcagcagtaggtttctatcaaatctgttcatttccatttattcctattaatcaaattgctaaacatgaactggggtgccattgaacaatataaataatatcatttactaccttcttaaaacccatcagtgtcttgcctttggacttaatggccctgcatgatgtgaccactgtttaccttcccagactcagtcttttcctctcctgccatcattcacagcactcctgccccaccaacctgctttcttactcaaaacgtacggtgtacatcattacctttagagcctgtgtgtttgcccttcccttggtctagactgttcctgctattgtgcctcagggctggtgtcttctcaccctttagatctcagtgtggttttcccagagagatcttctctgaccatccagttcagacatttctccctgttcttttttatagtcctcattttctttatggcagtgttagtgattttttgttatgtcagtgcacactgttgtacttgctctttgtctgcctttgccaagttcttcaaggttagggaccttgtttactcactgcactcagagcttagctcatagaaggtactcagataggtatttatcagataaacgggggagtaaatgatttatttccttcacaaacatctgttcctggaaatattaatatcacctattacttttttttgactgacatacttcatgagccacattgttttttagatcataactttttttttctactgatcaaaacatgattttctacagctttatttgtttcacgtaaatattagcatagttccaaataatgaactttcatgaaaagttaatttagtgattcattttagaagtagtgtttctggaacttagattacagatttttatttatttatttatttatttatttatttatttatttatttattttgaaatggagtctcgctctgtcgcccaggctggagtgcagtggcacagtctcggctcactgcaggctccgcctcccaggttcacaccattctcctgcctcagcctcccgagtagctgggactacaggggcctgccaccacgcccagttaattttttgtatttttagtagagatgggtttcaccatgttagccaggatggtctcgatctcctgacctcgtgatctgcccgcctcggcctcccaaagtgctgggattacagtcgtgagccactatgcccagccagattacagattttatagtcatttatactcttacatgaaagtattttaggaattgctcttcctgtcattttcctcacagtcctgttaacgcaaaactttttagttgcattaaaaagcaattcccattttgttacccaatggtcctcttgtgaaataagtggtcttggtcccctggattaagattgccagttgaaacttcattaccaaatttccttctcttgagcagaaaagctttttttaagtttaaaaaaaaatagtaagaaatcagtcagcagtcaaccaaataagcaaagtagcatcaccgaatccaataaatgttaaagcaggctcatggaacaccaagtgtgacctgacctcttttttttttttttttttttttttttttttgagacggagtctcgctgtcgcccaggctggagtgcagtggcgtgatctcggctcactgcaggctccgccccctggggttcacgccattctcctgcctcagcctcccgagtagctgggactacaggcgcccgccacctcgcccggctaattttttgtatttttttagtagagacggggtttcaccgtgttagccaggatggtctcgatctcctgacctcgtgatccacccgcctcggcctcccaaagtgctgggattacaggcgtgagccaccgcgcccggccgacctgacctcttacataccccacagaaaccacactcggggagattctgataattctcggtgatagcccaaaatctggaaggaagcaaactgagtgagcattactgtttttgactgtaactgaagagtaggagacatagttgctggggaggatcaggtgaaagggggagaaattgaccaagtggctgattccctacccagaactcagagcttctatttaaattagaatatgatctgagcactgtggtagaccacaaaacaaaatctcagaggagaggagagtctgggtattttattctaacagactgcactctcatctgagccccaacatttccttagacttcagaagagtagatagaacataaaataccagccctcacactaaagctatggaaaggatagaaattcgataaacttgtcttagatacagtgggaacagaattgagaaatcacccacactttgcaaataaaatgtctggagagctatgtgtaacctcaaacaagatgaaagaagtggcatcgtagctagtgcaaatattctatgatgaaaaaataaagaggaagaaagactgcagcctgtaaaatctaacaagaacccatcatggaggaaaagcagcttcaaggagcagaaggagattccttccaactgcttcgtgctgcagatcaacttaatgagaatttgagttcagaaaaacaagctagaagacaagatgataataacagaagaattgggaggttgtaggcctaaagaaatacgaataaattagatacagcaaaaattagaatgaaaatttaattactgacaggttgagataattgtagtaatacattgggaaaaaaaccagaaaagcaaaaacacacaaaggacagaaggtgatcaaatagaactataattgcagtcactgaagaaaagaacctaacacatgtaacagacagattgaaacagcacaaggtgtttcagaaaaattttatagtttcttcatgacaaaacctgatttgatcaagttattgagctttttgtgcttggagtgtatccaagaaaaataaagtcattgaacttttgggataaaggacaaattattatttgggaggcctcaggtagttctgtgctatctgctgtctggggtcatgtctagtctccacagagcctttgccttggtctttaggtggcccgattgggttaccaggccattatggagtttgaaacctgtaccctgtggtacatgatggtcattggcttgccagccatcctagaggggtcgagggaggtgctgtcactctatggaagacatctttttctgaatttctggaatctatctttgcttatttgcttgcttaggtcttagaattagttgttcactattctgttatcttggattcagctcccagaaggtgcatttatcttgtacttttttgtacgagatacttttttatgttttaaaacataaaatttatgttttattgcatcagtatcgttcttgtcttatgtttttttttctctgtgttgagagatgattaacagcatgttgtttaagtgtcttctgatggttcaccttagccagattatggggacctgccagcacctatgtgtctctgacaagctcttggtctgacttgttgacagaagaggagcaaaatacattaagagacagattgggcactctccgtgccctttaacagaaatgtggagacctgtttctgtccttcctctgtttctttcctttcttttaaacatacagaaacaagcctctggcttgaacataaagtctatatgtgtagttggaagctatatgagtccttctcaggaaacacctttcatagccagaattccaaaaaagctttgcagtggtatgcagtccattttataaaaacatattcctggatggatttatttctatttgaagtaaaatacaatatcatgtcataaaaaaaatagaggttgcgggtaggcagagaagaagagagaatgagaatgattcagaattcttcaggcttccaggcagaaaagcaaaccatgaaaaaagagggaaataagctggccacagacttctccgtagcaacattttcagtaccagcagtgttcaagggagcaacatctgcgaagttctggaggaaaaaaaggatggtccaagaatagtgtacccagccaaggtgtcattctgctgtaaagctggcaggcagatattctcaaacaagagtgaattcagggaaagagtactatgagctctacttaaacaaaacaaaacaaaaaccctcttgacagtgaaatccagaggagaattgaagagctcaagaaagagaagttgtggtaaaaggactgtgaggagattgagtcagctaaaattcaggactaaataactatggaattactgttattgaatgtagtgcaaatgttaaggacctggacattgtaaaaattttataacaaaaattggaagaagaaatgagaggcaatgtgagtgctaagatttttcaactttcaaagcaagaagttagtgaattctgtacaaaaataaattgcatataactttaaattcaacctctaaataatttttcatgtatttttaagagtgcaatattccaaaaatatgtaaaataatagttatgtgcaattaatatttaatagttgtcaccatttgttgtatttgcttcagatcttgtataaaatatttaagataaaaggaaaggcttagagaaaattaacaccaatggattcaccaccggcttagaaattaaaacactgctaacacagttgaagtcccttgcatgtccctccaaagtcccagagataacctgtatcctgattttggtgtcagttgttcatactttcatatatatgttatactttacatatatgttatacattacagatatatgaaagtatagtagaattaataaattttctgtttttagtctttatagaaacaatattctgcagtgtgctattttagcttaacattgttttgagatttatgttgacatatgttgctggcgtatatttttcattctgtatacttattctttatgttatctatctggatatattaccatttatttgttgattttcaatggatggacatttatttgtattcttttttgctattgtgataaactttcttatacctttatgcttatatatgataatgtttttcaagattttttaaatacttggaatatccaggtaaacttttatagaaaagaaacatttacttaagatataacaatatcatttctttttgtttttttttctattttatgaaaataattaaaatcaacactttattaacagtatcctcatatgcatagaaagatgtctggaatgatgtttacttaatgatatttatttctagatcatggaatgtggcatcttttaaaaaaaacttttagctctttattctttgtattggttacattctttataatgaacatgtatgatttttataaaaacagtagagtttttctcaaaagcaaaaactcaaaagtgagtactttaagatactgaatgtgattattgaataatgcattaataagtataaattgcatggcaggattataaattattttctttttggcatttttgtattttaaggtctttatattcgtagtacaagtgaaatgctataatggtattctggcttttgaaaatgtatttttagtcaattatataaagaaaaggaaagattagtaattttcttttacttaattatcatcccttttttggtacctatcttcagtttctcatgattaaataaaagaaaagttattgtaataaaattttgagtcccttgagtacaatgcaacctttaaatgatttagactgtgtatagaagaggttttcaggaagtgttagaaccttccagtagctttgtattcctttcttttcccaggattttgtagtccagctcctcttcctgagttatcacttgtccagtgggcccaggtgtcaggtttatttgtgaaggtgacaagtgcccccctacatccatggtggatttagtgagcatctccaaactggattatgtcacaaataaaatagtatgagatgttctgtcttattagttgggtgaaaatatgatctgtttgttttgtaggtatgaccttgcttctagggagtggcttccactaaaccgttctgtgaacaatgtggttgttagatatggtcattctttggcattatacaaggtaaagcatctccactctgtgctaagcaagaaactaagttttcctcagttacttcatgtattacatagttgaaaagctacctcagtgttggtttttaattggggaaaactttttattgggggcattatataattggctaagttataagtagaaattaaaatggaaacttttttaactcaagagattttaatggcttcaaactgtaatggggtattataataatggcactaaatggttaaagatgtagattaaaaagtgtagattagcttttattctcataagcaagtttagccaagaatagccacattgtaatgtggctgaacaaacattttcatttcctcatttttatagatagatggtaggatgaggcaactttatttttccaagtccttttatactataaaagattcatgtgaggaagtccaagaaaactggtgaagtattagagatgtaaaatatgattagttttatttcccttttccctttttttatccttttcctagtaactcactgaaaggcgccttttgctaacccttaaaattttttttaatttattttttactgaggtaaaatatacgtatataatggtaccatctttaccatttttaagtgtacagtttggtggtaataaatatatttacattctttttttccttcttcattctcccccaccagcctgccagcctctggtaaccaccagtctactctctatcttcatgagatccacttttttagttcccacatatgattgataatgtgatatttgtctctgtgcttggcttattttacttaacataatgacctccagttcagtccatgttgctacaaaatgactggatgtcattctttttaacggctgaataatgctccattgtgtatatatacaccacattttctttatctaattatccattgatagacacgttgattccatgttttggctattgtcaattgtgctgcaattaacatgggagtgcagatatctctttgatatgttcatttccattcttttggatatatacccagtatcgaaattgttggatcatagggtagttctatttttagtttcttgactaaccttttttaagctgagaataatattgagcttttgttcttctctgttctcagatttaatcttttcaatgtttttaaaaattttgtttgcatttttttcctaggataaaatttacatgtatggaggaaaaattgattcaactgggaatgtgaccaatgagttgagagtttttcacattcataatgagtcatgggtgttgttgacccctaaggcaaaggagcagtatgcagtggttgggcactctgcacacattgttacactgaagaatggccgagtggtcatgctggtcatctttggtcactgccctctctatggatatataagcaatgtgcaggaatatgatttgggtaggtatattttttccagtagatgccttttgaacatcagatttaaaacctctaagcttattattttgactgtttagaaaagttcaacctaatcttgattcggtactttatcttgaaacatagtaaacactgggcccaggcgtggtggcccactcctgtaatcccagcactttgggaggctgaggcgggcggatcacctaaggtcaggagttcaagaccagcctggcaccaacatggtgaaaccctgtctctactaaaaatacaaaaattagcctgtcctggtggcgggcacctataatcccagcaactcaggaggctgaggcaggagaatcgcttgaacccgggaggtggaggttgcagtgagccaagattgcaccactgcactccagcctgggggacagagtgagactccgtctcaaaacaaacaaacaaacaaacaaacaaaagcaacatagttaacattgatgtattaccagtgaaatgcagattatcgatgctcctatgtagtatgtatttgttactgtcaatttggtaaggagccaaagatgacgcaaagtgctttgggtatttaaaataaataaataaaaatggttcaaaacaataaatattgaagaaaaaaaatatttgcccagccctttagagattggtttagtggagtatgatttacccttaatatgaaatatttcccttggttaaatttcattgtatctgttgttgtgcagtaggaataccaggtataattaacattttgtgaaagtaggcctataaaatatatctgtatattggtcaccaaaggttgtagggaattaaatgttcatttgagtgaacattttatttattgagacaggctcttgttctctcacacaggctggagtgcagtggcacaatcatagctcactgcagccttgatgccctgtcctcaagtgatcctcccaccttagcctccctagtagctgggactacaggtgcgtgccaccactcctggctaattttttaattttagtagagatgggatcttgctatgttgcccaggctggccaacatagcaggcctcaagtgatcctcccaccttagcctcccaaagtgctgggattacacatgtaagccacttcgcctggccctgagtgttttaaatttagttaattcttttcctacatggcatattagaacatcagaacatagaacagactggaattgggccacatggctttgttataagttttaggtggctttctttaaaatataaagataaaaaagtatatgtatcaggtctcctgaaatccattctcatgccctaagctctttggacattttcagtagtagagaggaggagcctgccatgcttgcctttaactgtctttcctttccagataagaacacatggagtatattacacacccagggtgcccttgtgcaagggggttacggccatagcagtgtttacgaccataggaccagggccctatacgttcatggtggctacaaggctttcagtgccaataagtaccggcttgcagatgatctctaccgatatgatgtggatacccagatgtggtgggtactttttcttgagctttcactttaaggtgtaaattctgtagaggcaattgtggagaaaatattgtgctatctttttgttttcatgcctggcagataattctgttcggcattatatatagagaaattgggaaataaacagagggtaataaagtagctagtatttattttgttacgttattctgtaattctgtagcaggttggttagaaaatacttagagttttttaacaaatgtaaagcaaatttgagttacgaaataatgtaattataaagcgatggtttctcctctttttcctcacatgtttgataccttgctatgggtactgttttatattctgtcataaaaataatcatttttagtagctgtgcaatactccattttgtgggtatgctgagactatgcaggtgaaagttttggtttctttctagtttttatgtcattaagaaaccattatgcattaagcttctgtcaatatttcacatgatttctgcccagaaactggaattatatagctacggggtatgaagagtttaaggttcttaatatattttgccaaaactcttacaggtctttaaaattatctgtatttattgttgaaaaacttacttttatgtagggaaaactctggaaggatttgtacatttgggtctgaggttaataaagtggttgtgcttgcattagcagatacataaatattctttaaaaactaaccttgtatttattatttctaaataaactcaaaaggaccattcttaaggacagccgatttttccgttacttgcacacagctgtgatagtgagtggaaccatgctggtgtttggaggaaacacacacaatgacacatctatgagccatggcgccaaatgcttctcttcagatttcatggcctatgacattggtaagtttcccaaaaccattttctcttcaggcatctttttgcctatactataagcagcatttaaaaggagactgaaaatattgccagttcaaaatgatcaggccatttgaaagaggtccaaatggtattttttatattcatttgactaatgttacacatctggtaaaaattatttctacattaaattctttttgaaatcactcctgttaattgcttgaatgctaatttttaaggctgagttgaggtgtctagtctctcctttgtcatgttatgcctacctggtagtgttacatagttgcaaccaccagcattgtgttaaaattggttcacgtattagctttatctcattccctagaaaactggtttctcacatggtcttggtgtggcaatataccagaccagaagagggcagtatttgttcatgcaaagcaaatgcataccggatgatctctttcataaaaattgtcagatgttcattttaaacaaattattatttttttgattgtggtaaaatacacataaaatttaccatcctaactatatttaaatgtctagtttagtgatactaaacacattcataatgttataaatccatcaccgccatccatcttcagaactgtcttcatcttgtaagactgaagctgtatacccattaaacaataatgtcccatttcttcctccccacaatgcctggcaaccactattctacagtctgtctctgtgattttgactattccaagtcagacattcgtttttaacagacatttgtgtgccagccactcagtttgtacattgaggagatcagatgaataacttaaagcccttagcctcaaagtagaagaggtagagaaatgagcagacaatagaattgcacttcagggtgtttctggctgaaaagaatgtatgagagcacctctgagtaccctttaagtcatggagggtagagtgataaacagggaacactttcttaaggaggggccatcctctctgggtccttggggacactaggtgtcaggtaggtgaagttaggcagcactctccaggcagaggaaacccagtttgcagagacacagaggtggaaaagaccggcacatatttaagggctcaaagagtgagacactgagtgtgaggttggcatggtatagcagcaccagttggtattagatccagaagagaagttgctagtatgggtcacaacaagggaaaattaatcaatctatgggatctaggaaaggactttgtaaaaattaggtgacatttaaatttcttgaaatttcattttccacctttatttttccattttagctactaaatttgagcaaatcaatatagaaaagagtggaaaataattatgaaacccatgttttgctgacataagctttgtagaatgtaaaatttgcttgctttaaaaaacattcttggctgggcgtggtggttcatgcctgtaatcccagcactttgggaggcccaggtgggcagatcacgaggtcaggagattgagactatcctggctaacacggtgaaaccccatctctactaaaaataaaaaaaattagccaggcatggtggcaggcgcctataggcccagctacttgggaggatgaggcaggagaatggcgtgaacctgggaggaggagcttgcagtgagctgagatcacaccactgcactccagcctgggtgacagagcgagactctgtctcaattctagtgcatcaaactgataggcagttgggtgagtgatccagatgtcatggatttcgggtgcgtttgctagttagaattgtggtatgatcccgcctttcttccatgccctgttgctctgctgctgcttcattttaacccagaaatgatgttgtaactgagaaaattgagaggcatgttttatgaggttctctttgttgtagtatttttcccaaagaaaatgtcaggtcctgttgattagaaatggtagtccgtttaaaaatatatttttctttctcctagcctgtgaccgctggtcagtgcttcccagacctgatctccaccatgatgtcaacagatttggccattcagcagtcttacacaacaggtaattggagaagtgattgctccttttcttttgtgtttaaaatgaaaataaagggccgggcacggtggctcacgcctgtaattctggcactttgggaggccgaggcgggtggaatacgaggtcaggagatcaagaccatcctggccaacatggtaaagacccatctctactaaaagtacaaaaattagctgggcttggtagtgcgtgcctgtaatcccccctagttgggaggctgaggcaggagaatcgcttgaacgagggatgctgaggcaggagaatcacttgaaccagggagttggaggttgccgtgagacgagatcgcgccacagcactccagcctggcaacagagcaagactctgtctcaaaaaaaaaaaaaaaaaaaaaaaagagaaaagtaaagtggaattggactcaacatattattcacaagattccctcatcccagtagtttttttacaggattatgtgggtataaattttctgatttatgtttaaaatatttgatgtggaggtgaattactttgaatgccatgtttattgatctggttttgttagcacgcaagagcatgctttttggtgtggtctgagtgcctggggcaacaaaagttacgtgcatgtcattgtcttatgtcctttgttattgttagtggtatttaggttgtcaagttcctagtagttgtatctgaatagtaagaagtttggaaaagaggagagagggcacttcagatggggggataaggtaggagaacagaggtggagagattgtgaagtttaatatagctcaagtctgtaggctctggataatcagaagtctgcagttcattgcattttatcgctcaaaaatgcctggcccaaactaccagagctcttcaaaaaatcggcccttggagaagtctcagtcaaataagggagattcagagtggccactctacttgttccttacagtgtgctttaaagatttttaagaagttaaacagcctaatcacattattaatttttctcattcagtttctgctattactactgctgtctactttcccttttttaaaattctaagccatataaatcctaaggatgtttaagcgttataatgcctgcatcatgttagaattcctttggcttttgaaatttctgttgtaacgatggaagacagatgaggtaatttcacttagattaggaaagatgagaggccgggcacggtggctcacgcctgtaatcccagcactttgggaggccgaggagggccgatcacttgagcccaggagttccagaccaccctggtcaacatggcaaaacccccgtctcttcctaaaatacaaaacaattagccaggtgtggtggtaggcacctgtagtcccagctacttgggaggctgaggcaggagaatcacttgaacccaggaggcggaaattgcagtgagccaagattatgccactgcattccagcctgggcgacagcgagactccatctcaaaaaaaaaaaaaaaaaaaaggaaaagtgagaaggtgacatattttggagatgttgtgaaggaagagttgagacaatttaggaactagctactaggaaaaggtgctatcttatataaggtaattatttcgttttttagcaatgtgtatggttttactatgagaacatttgacagctagagactaaaatggaaggatttctggccaccttgctaatttgaagtgttattataaatcataatcttgaacttcctcagtacagaagacccttaaagctttctagcaagtgcctcttgagattttcatctgaaacgcagtgggaccattttgtcattatcatgcctgtgggagcctggcctcaactgtcttcgtttgtgttcctagttctcctagcacaggatttggcacataatagacatttgctaaatggcaggtattagtacagtcataactagcaaacaaatgaattttttataaaacattcttaggttttattcaaactcagagaagttgagactttaccataaaatataatttaatcatgagtcaaaattgggaatgccttgcctgagttgtaatgttttcattttatgtgattccagtggtatgtttgaaccctgatatgtaagtatctgtgtgtgtgagacaggattgggtaggtggcaggagaccctgagggaggccagctactaaaaggccatagttttggtttaattttatgaaataatttactgaaaaagaaacttcgattcacagcatttcttcatgctttaagtggatcaacagcattgggtgagctgtgccttccttggttttcattgaggttttgagggaggcaggaaggaggaggagagatggctgtgacataccaaggcggcaggagatgcagctgtgcctctcagttgcctgctccatgtgtctctgagagactctccctaactttgcagagcccctgtgcaaccagatggattcacaattgctgagaacaccaactgtactgggaagaggaggttgcttatttggtttaagcaacaaattaactagttgaatctagcctgcttaatgtggtactgagtaagcctatagcaaggtaaaaaatgaaacctggccgggcgtagtggctcacgcttgtaatcccagcactttgggaggccgaggcgggtggatcacgaggtcaggagatcaagactatcctggctaacactgtgaaactccatctctactaaaagtacaaaaaaattagctgggcgtggtggcgggcgcatgtagtcccagcttctcgggaggctgaggcaggagaatgatgtgaaccccaggaggtggagcttgcagtgagctgagatcgcgccactgcactccagcctgggcaacagagcgagactgtgtcaaaaaaaaaaaaaagagaaagaaaccttatattaattttttagtttttgaaatctaccagtaaatatttcagattaggccaggcatggtggctcatgcctgttatcccagcactttgggaggctaaggcaggaggatcacttgagcccaggagtttgaggctgcagtgagctatgatgacgccactgcactccagcctgggtgacagagtgagaccctaactcaaaaaaaatatatttcagataacaatttgttttcatttttcacaactctataaagtaactataaacactgaattcttgaatattgaattattgctcctaggggaaatacagggttatgtttctataaacctctgatgacattttcatcaaccagtcagcatacataactttcttttatgtgtgtttctatttaaaaacatcttgttgaatatatattcttgatttattaacattgagctcacagccaacagcactttaactcatgcctgaacaaagcttatgtaacacacgtattttctcagtaaggctcgtcacagccttcttacacttaggaacactagacagcacttcagcactgcatagggggccattttcagcagtgaaagcactaacataaggcacaaaaatgcataaaacatggcactagatacatcatggaagggacacttgtttgtagtatgatagttgaaacaagaagggagagcatctccttgtttgaccttagccggtaatatgcatgtgtgtcaactcaaattttttgccattctttgcacacacatgctggtaaatgaccatgaaactactgcaagtattgattttggaattagaaatagattttataagtacgtgaatttgcaaatatggaatctacaatctgcagatatggtcatgtgtcactgaatgatagggatacattctgagaagtgcatccttaggcaatttcatcattgtgccaacatcacagagtgtacttacataaacttaggctacacatctaggctatatggtatggcttgttgctcctagctacaagcctgtgcagcatgttactatactcaatactgtaggtcattgtaatgcaatgtaagtatttgtgtgtccaagcatatctaaacatagagaaggtacagtaaaaatgcaatataaaagataaaaaaatgtacacctgtacaggccacttactatgaagagagggagcatacaggactggaaattgttctggggaggtctgtgagtgagtagactgtacactactgtagactttgtgaactgtacacttaggctacactaaatttattttaaaattgttttcttcaataataaattaaccttagattactagatgacaaccattgtacatgccatccatcattgatggaaacatcgttatgcaggaccacatacatgactataatgaggattggctgtcttttaaagatgaagacttaatttttaaaacacaacccctatgcagttattacacttttattctttaagccaggggtggtggctcacgcctgtaatcccagcgctttgggaggccaaggcaggaggattgcttgagtccaggagttcaacaccagcctgggcaacacagcaagacctcatctctactagaaatacaaaaattagctggtcatggtggtgcgtgcctgttgtcccaactactcaggaggttgaggtgggaggattgcttgagcccaggaatttgaggttgcactgagctatgatggtgctgttgcactccagtctgagtaatggagcaagactctaactcaaaaaaaaaaaaaaagttgttctttaatatctctcagtgtccattcagtgtttacatctcctaattgtctcaattttttttttaagtttagtttgttcaactcagaatccaaataagatccatatgttacaattggttaaaatgtctctgaagtttctcttgatctgtagggaccccatccatcattttcccccttacttgttaaagagactgggttgtttgtcctgtagagtttcccgtagtccagattttgattattgtatcctgggctttcatataacatattggtctctctcctaaacttcctacaaattaacttgatcagattcacttcagtattttggcaagatcacttcataggtttatttctttccctttgtttaccaatcttcaaaataatgtagtgatttcttagtattgtccaaagatgacaaattaggttgtttttttttttcaggggatgggagatgtgtatcattatgaactcatggatttaaaaatatttcatgtgttttaatctattgtagtttgtgtttttattaaatttcaaacattttccatctttagccagtgagggcatctttacattagcttttgagtttatctgatactaccctcgttttcttttcttcccagtataacaagatctgctagactcattgtgaacatttcttcatccagacatgaaattaggtttttctctaaaaagttctagtttttaaggggtgacaggagggagaaagaatggtttttaaatacgcacaatctaagcactagttgtattcattgctcctgggttggctgttgtttctaggttttttaagaaggcaggttaaagagaaactgtggtgttcttctttttaaaaaggaaaatgaattatttgtgcacgtttgtgtgtttgaccttctagttccctcaatagataaatggctacattgtttgaatacttttctctgcgttccattttttcccccacatagcagtatatactggtgctcactccatagaagtatgtagaaattttcctcattccttttacatctgcctaatatttcattatgtggatgtattatagtttgtcacatccccaattgatggacatttggggctgtttgagtcttttgctattattaacccatttatgcctagtgttccattattggaacgctaagcttgtgggagttatttatatcctgctgctcaaggtcatccccaaggtctgatttttcacaaaaaaatttgccctctggcataagtgggttaatgctgtagtgaatagcctcatgtacttctttttgtatttttgctattctatctttgtgctagacttctagaaatgtgatttcaggttcaaaaagtaaatgcaaagttttgttagagcttgccaaatccctctgtaggctgcatcattttacatgcccagcagtagtgtgtgagagtgccttttgccccatagtctcaccaatccatatattgtcaattttttgtgctttttttttttttttgctagtcttataggtgagaaatgctacctcagtatagttttaatttgcatttttcttacactgaaattagagcatcttctcatatgtttaaggtcatttgcatttttttctctgcaaactggctgaagccccgctctatgttagggatagtccttttcctataacataacttgtaaatctttttttcatagcatatcatttgtttttttactttgcttatagcattatttccatgtaaaacgtctttttaattcatatgaccagatttttcaatcttcttttcccctaccttctggattttaagtcagttttttttcactcttaggttatagagaaattcacccattcttctactgcttgtgtgttttgtttttctcagaagatgctctaatccatgtggaaattatcccagaatgtagagaaatagattcaattttatttttttccatatgtttagttatcttgataccatttactaaaaagaacatcttttcccactaatgtaagatgccacttttactgtgtactaaatgtacatgtgtgcttttatctgtttatgattgggctcatattcatgtaccagtatgacacaactttaattacagaggcttttacctgtgctttaaatttgtacatttttatttttaatatttaaaaaatgaagatatagaattgctgtttagcattaaaagatgtgagcatatcctgacactaaaattttccagtgactcatggttaaaagtcagcaggctatcatgagaactttttaatacagtagctatgacgaggaggcagattattggaactattctgggtgtgttataggccaggatgaaaggatggaatttggaaaggaagggaatcataatgttttttaagaccttgaaaaataatttcttagaagacttatgatatgtaagatttgtttgaagattgtctgtaaaaagtgtatcatggtagctggatgtggtggtgtgtgcctgtagtcccagctactcaggaggctgaggcgagaggatctcttgagcccaggagtttgagactagcctgggcaacagagtaagaccctgtctcttaaaaaaaaaaaaaaaagtatagcatccaattgttatctgagtctctagtaaatttcttctctccctttttcctcttagcaccatgtatgtgttcggtggtttcaatagtctcctcctcagcgacatcctggtattcacctcggaacagtgtgatgcgcatcggagtgaagccgcttgtttagcagcaggacctggtattcggtgtgtgtggaacacagggtcgtctcagtgtatctcgtgggcgctggcaactgatgaacaagaagaaaagttaaaatcagaatgtttttccaaaagaagtatgtttttttttctctacttagattttaatgaatttgagacctcattttatctgaattgtgaaggaacttagcatatgtatactttttatgtttaccttatccaaaattattcagtaataacttgtacaaagtgtttttggatatttgataattggtttgtaaacatctcggatgggaacatgccatgtggctcctagaagctgtctgcgagtgatagagacataaccgttttggcattgcataggctttgcatactgaccccagattctggctgcagttgctctgaggcagtgccatccagtagaactttatttttgatgatggaaatgttgtgtgtctggactgtcccgatatggtagccactagccacatgggctatcagatacttgaaatgtagctagtgtgagtgaagaactgaatttttaatttaatttaattttaatttaaaagacatttgtggttactggctaccatattggatgcagatctaacattaaggatgaagttaggagagtcagcccagaaaagccatgttgaagtaaatttttttggtggagggagggagagctgctgtccttgcaaagtatttttgtctagcgtctctagttggatacaacagtgatatcaagacagacagttactgaggatgggcgatgatccctgcttctagaacctcccccatgtttttcaagctgtttccgtccttctgcctgctttgcttcttgtcctatattgctgtgacatagagcacaatgcggtacagtgaagcgatatattaaaaatttattttttgttttattttattttatttatttatttatttatttattttgagacagagtctctgtcgctcaggctggagtacagcagcgtgatctcagctcactacaacctccacctcccaggttcaagtgattcttatacagtcacctgccaccatgctcggctagtttttgtatttttagtagagatggggttttaccatgttggccaggctggtctggaactcctgacctcaagtgatctgcccgcctcagcctcgcaaagtgttggaattacaggcgtgagctactgtacatggccagaaagttctttaaaagtaagaatgttgtctctacatcaattaatttaaagtatgttggctgaatttcttactagtaggattggtgttgcagttaacttgagagttatgatggatagaagcagctttcattcctgggatgctgctccaagttaaacttttcacgaatataaattctcagtaagaacacccagggccagccacaggggctcatgccggtaatcccagcactttgggaggctgaggtatggggatcacttgagcccaggagtctaagactagcctgggcaacatagtgagaccctgtctctaccaaaaacacaaaaattagccaggcatgggcatggtggtgcacgcctatagtcccagctactagggtggctgaggcaagagggcttgagcccaggacgttgaggctgcagtgaggcatgagtgtgccagtgcactccagcctgggtgacagaatgagattctgtctcaaaaacaaaaaaacaggccacccaggcaacccactcaggttcattggtgggctggtgggtgctggagaaccaagattaccagaacttagcagggttagcttgtctcttgaaagggataaaatcagtgaaatagttaatttttaaaccaaattttaaaagttcaaattaaatatgcatgtttataggaaatagtgttgaattaccttaggtgttcatatcaacccatttgctgtcatctcacctgagacttcagttccctgtttcaccccactttctgggtgggcccagtccttgggataatgaccaggacaggaagagcagcctaaggagccgactgctggggtctttgtgagagcggcacctgccttttcctgtttgtgaattcccccatgtgccatgtccacgagatggttgaacagatgagacaacatggttgtgcagcttctctcttttttttttttcagacagagtctcactctgtagcccaggctggagtgcagtggcgcaatttcagctcactgcaacctccgcctcccaggtcctgattcaagcagttctcctgcctcagcctcctgagtagctgggattacaggaacgcgccactatgcccagctaatttttctaggtttagtagagacggggtttcaccatgttgaccaggctggtcttgaattcctgaccttgtgatccgcccgcctcggcctcccgaagtgctgagattacaggcatgagccaccgcatccggccatgcagcttctcttttctagagttaacaggagatgcggcaggtctgtagtagcccagaaattctcagacttgcactcttgaatttacacgcatgtacaaaatgcagctcagcctaatgcctcctgttcagttctgtggtgctgcctacttcctgtgcccaaattagccttgcgtttataactaggaggaatgacttggtgtcctacaatattttggctcctgggcttctttggtgttcattctattactagttgattttttttttcttggaaagaaaagtattcaaagagccagaatttactttcattatatcttacagttgttaaattaacctatccttgttttcactttctgtgtacttctttctttggggtacaaaacagtgtttctttagattgtctatttctaaatattattttaaccagaacataccaaatatattttcctgccagtttcattcttcattttacttcttaaccattgttacgattttttttttaacttcggtctcagattttgctcaattgaagttgtcccagttcatgagattttgttttctttgcagctcttgaccatgacagatgtgaccagcacacagattgttacagctgcacagccaacaccaatgactgccactggtgcaatgaccattgtgtccccaggaaccacagctgctcagaaggccaggtcagaggctgtttcttaaagatttcagaaaaatcccaatttgtcataggtttagcttttatagtgtatatggtataaataatggcccagagttacttttcaaatgggtttctatttggattttattatccctgaggttttcctttaggaagagatgttctgtatatttcaagggtcctactagccctgggaatttgtgtattgtgttttagaagaaggtaggactgttgtccctgggcatggctgtgactaagcactggatccttggtttgaggcatctgatagtgacctcactttaccagtgccaggttttgataaagttagggtttgagagtgagtcaggtgtacagcggcccatattgaactgtggaaatgacagactttgcaaaatctccttgttttatatcttggtttggcataatctcactgctcatcatatatagatttttaaatttaagttataagatgacccaggcttttatagtttttgacagcttacaagacttttttttttgtcagtctcatacagttcataaaatagaaaactttcagacttttgaagtgagcatttgaaaagcaccaagttcaacattcccattttacagatgagcaggttgaggcatggtgtttaaaagagtgggctgcttccttgccagttaaaagcatgtccttgagcagaacattccattgcagtgttccccactgcagagctactgcaacttatctatctatctgtctgtctgtctgtctatctatctatctatctatctatctatctatctatctgtctatctatttatttgcagtttgcttcctcaattagattttgttgtctataatatcctgttggtcctcaccataagttctctctgtggatacaaaagaaaagcttttgtccactgtgttctagatctccatttttaggtatgagaattgccccaaggataaccccatgtactactgtaacaagaagaccagctgcaggagctgtgccctggaccagaactgccagtgggagccccggaatcaggagtgcattgccctgcccggtaggccttgcagggtcatcttggtgtgtgtgggtccattacttcagcctgcttcccccaacactgtgcagcctaagttgaacctagcagaggggaagagctaattctgtccattcatcccccacacgagtattatgggcttttttgtttttaactaaaatacagttcttaagtatttgttcctactgtcctttgaaataaagtgaaacatcctttgctgctctgtagaattgagtgacagcttggttctgtatcactgagcctgctccttgtctctttcccatccacctttgataacctgggactagaccatgatgtctcagcagtcagtctgctgagcactttatggagagtacttcttattaaccactgggatttaattgttggcacctgctaatgggccttctctgagaaggagaggatagatacttctgtcagcagcaccttttaggggtgatctccagccctgaaaacctcaatatatcctgcttctgaggttcaggatgatgaactcagggcctgagaccagccagccatgtgatatatttggaccagggtggtccagaaaggggaacttccttgtctgtgcacaacatctgagcttgttcagggaagttggtttggaccaggccctttttgaatgtcccttggaagtttttgattcagcttgcagagtgggactcttttctatatctcagtgtgtctcaaattttaaggtacaggaaaagacctgggaatcttgcgaaaggcatattctggtgcaagtgtggggtggggcctagagtgtgcattttatctagtcgactgctacactgtgaggagcaagtctttgtctgttcttaaatgatctctttcccatggtacctttcttttatctcagtgactgttactgttaatgaacattgttgatgtctccaaagtactttggttctggtgaagttgctttgttctttcattgtcttccaggaagcattcatagcttctgtgcagtaccttgtgtgggttcaggatgatcacaggtagcagattacaagcttgtcttgtatgctatagccatatcacttgggttgtttctcaagaaggaccttctcaccttgcttttgggatgctttgtacacttgattgtaccttccacctgatgatatgaaaacagtgcagcttttggagactatagatttgttaattccttgattcatttccattcttgcagtttttaccccagccctccaatatgcatattcatttgtctgctcttcacttaggattttagttttctaattgttcttcagaaggaagtgtaccagtctaatattggcaccaaactggtgttttcatctaagacataggataagtgacctcagaatatgctttttaggatccgggagatatcaccagtaaacattttaaaattcttgtattctgcatttggtccttaataatgtgtcagaggctcccacatcctaatgaagtacctagaatttaaattagaaaggccatttcggtattcagtaatttgaactcataatacagtagttttgtctgatttctaaaattcttttctttctcttttccccttaatgaaagaaaatatctgtggcattggctggcatttggttggaaactcatgtttgaaaattactactgccaaggagaattatgacaatgctaaattgttctgtaggaaccacaatgcccttttggcttctcttacaacccagaagaaggtagaatttgtccttaagcagctgcgaataatgcagtcatctcagagcatggtgagttaaaatcctcaaaacttaagtttctggttatccacctttctaccaagggcatgactgcagcttgcatgtggaaggctgtggatatgtgtgacgtgcttggcaagaaggggagtgctggtgaacgcagcctgagggactgtgggtttgtgctgtcagagtctcttcctcttaaaatttttaatactttgtatatataagatctatgaataattatatgggggatgaattgtaacatgtatatgtgtacataatctggtgacatcagtagattatttcatacctgttttacctctggattctgctaggggagaaagagaggtcactgataattagctaggttggattaagccacctgagttccttggagttaaggtattataatagtgcataagactgtataattaccactaagaagtgtacatctcagctggatgtggtggctcacacctgtaatcccagcactttgggaggctgaggtgggtggatcgcctgaggtcaggagttcaagaccagcctgaccaatatagtaaaaccccgtctctactaaaaatacaaaaattagccaggcatggtggtgtgcgcctgtaatcccagctactcaggaggccgaggcaggagaattgcttgaacccaggaggtggaggtggcagtgagctgagattgcgccaccgcactccagcctgggtgacagagcgatactccgtctcaaaacaaaaaaagaacagcaaaaaaaagaaatgtacatctccttgggtctttcatagcccagccatctcaaaagaagagagcaccttcttgtcaagagtttctaagcccagaaaggctcaagttctctgcttgtccacccagtgctctcagggggcttatagtcaatattccatgatcacattttgtcatttttagtctggagtcataaattgtgatcctaccgtcagttaagtagactcatagaacaaagctctttcagcagtttcagctgtggtacagaaacgtttagtggaaatgttcttaccaagcagggaggagttgagggcaacacttccttgggtacagcctccttcatgtgaaggtatggaaatgtggcctgggtctcggctgcctgtggcctctgtgtaccacctatagggccattctgagactggtaggaggtgccctgtatttagttttctccaattagtcccttttttcagtgcaacttagatggggtatggacactcaaacattggtgacatattcttagtgtgtttacctcaggctactgtgaccacatttggtatttcataatattttgatagctttttcagatttcagaatctccattggtgactgtctctgttgtttctctttccatgtccaaatgtgggtctcttccagcattccatccttggctggcagctgacctttcccatagttattcactccctcagaaaatggatggcacccagctttgcttattaccctggtgtctctaacaatgactctcgagtccacagaagttaaaagggttcaaccaggtggccacagatatacttctggtaccctttctctcttccttaggttttctaactctaaacgtttctgggtattctaatctgctgtggccacgtttatgaaacagaaattcacagtcttaatgataagactgacagatgagagacaactgaagtgtaatgtccttccacagctatacctctagatgtagcccagttagtagagcccagatttttatggaaaaacaagaaaggacacctagcctaacccttaggacagaggctggctggtagaaagctggaaggaggtgacccctgcaggtgagaaggagtgaattaggatgtcgaagacggaagggctttctgtgatttaattagtgcccccatctgtgagatgtagagggagatgattaagggagtggctctttgagtgagctgcaggtaagtttgcatggttggctgcaggctggatgggaggggatttttatagttgagcctcaggaaggaaccaaggccagaccctgcgaggccatggctacaatagtaatggatttgaattgtatcgtgaaggcaaagaaattattgaagggcctttaaaaagtatttttaattgtctttctttcttttggatctgtttatttttaggtcttttagtaggcatgtgtattttttcctctcaaaaatggaaataggctgggtgtggtggctcctgcctgtaatcccagcattttgggaggccagtgagggaggattgcttgagcccaggagttcaagactagcctgggcaacacagggagacctcgtctctacaaaggaagtttttttaaagaattagccgggcatgatggtggcacatacttgtagttccggctacttgggaggctgaggcaagagggttgcttgagcccaggggtttgaggctgtagtgagccatgatcatgtccctgcactccagcatgggcaacagagcgagaccctgtctcaaaagaaagcaaagggagggaaatacagtatatcttttgttttataactaccaaaattaggaatacttaccatttcttggctaaactttatattttgatttttaaaacttgttaaaaattgcaatgagaaggaaatttcaggagagcagaagacagactgtcccaggtgtcactgtcctattattccctataaaatccagtgccaggatggatgaatggataaagcaaatgtggtataagttgaatatcccttatctaaaatgctttggacgaggagtgtttcgaattttagaatatttgcattatactaaccagttaagcatccctaatctggaaatccaaaatgctctagtgaacattttccttcagcatccatcatgttggcactcaaaaagttttagattttggagtgttttggatttcagattagggatactcagcctgtgtttgggggtagccatctcttcatatagacatttcagaacttaaatattgctttgctataatttctgtgaatttttgatatattatcttctctgagctacatttttatcctttataaaatggccatattgaagtgatgatctatcctaatctaccatggctgagtcaagggataaagaggttttcctatgtctgtggggtatacttaacttggtggtttttatctagaagcttgttttggtcaagatgttggttatattcaggccaggcatggtggctcatgcctataatctcaacattttgggaggccaaggtgggaggatcacttgagctcaggagtttgaaactagccagggcaacatggcaagactccatctccaaaatttaaattaaaaaaagatactatctgtattcatagttgtgtctcttttgcctttagtccaagctcaccttaaccccatgggtcggccttcggaagatcaatgtgtcctactggtgctgggaagatatgtccccatttacaaatagtttactacagtggatgccgtctgagcccagtgatgctggattctgtggaattttatcagaacccagtactcggggactgaaggctgcaacctgcatcaacccactcaatggtagtgtctgtgaaaggcctggtaagttcacaggtgaattaggtggtattcagagtttattgtgagagaaaccataggaggcatagttcattgctgagatgtgtgaagtagtcatgaaaacagatgaagtattgatttcaagcatgcaaagaagagtataacccagatttcagaagcagaaggaaatattctgggaccctgaatagttttaattataagcaaaactaaaaataactaacactactcgaagaaactgatattctaattaacaatgagattgataggtttattgaccagaaaaagtattgagaattgctctgaaaagcaaatttattggtgttggcagagaaatgctgtggaagaagaaacaaaaaaggaaaataaaaacaaagaaaagattagtaaagcaagcaagtgactgcagggacagtgttcagaaaggtagtgtcaacagggagaaaaatgatgagagcagttctgtaagcgaggacagaagcaacccagaactacgcgagagctgcaggagagtactgagcagacagacactcggagtagcttcccagctttcagtctctctgggctacattttggctaactaaaggcaggcccaggggtagctgctgcagcatgaagacaactcaaaataagcctcctcctcctgcagagggactcacaagcagtcggtggaattgtggattattttgggaggctggactccatttgcattgtgtccaattttgggaaagtaatttgtctgaggaattacagaggtataggagagaattcatagcattgtagatttctaaatattgatttctaaacttctctaggggagctgcccagcagcctttcagaattctgaatcctttgttgaacttaatgaatgccgtagaccttcttccctccaaaattgcaaacatgagattttacatattcaagtggattgtaaaacccctaaagttcatcctgggtccccaaattctaaggggcttacagccctacttttatggaaagattcactgtttcctcatctttgtccttaatgctctttgaaaagaaaatttattttttccacaagtgtgtaaatacacttgactaaacagtacttgatgacttttattgttttctattttctctcatttaattgatttcatggcacattaatgggtcatcacccacatttgaaaagtcttggctgggcacagtggctcacgcctgtaatcccagcactttaggaggccaagacgggtggatcacaaggtcaagatatcaagaccatcctggctaacatagtgaaaccccatctctactaaaaatacaaaaaattagccagacgtgatggcgcacccctgtagtcccagctacttgggaggctgaggcaggagaatcacttgaaccggggaggcggaggttgcagtgagccgaaattgtgccactgcactctagcctggagacagagtgagactccgtctcaaaaaaaaaaaagaaaagaaagaaagaaaagtctttgaccttagcggacatggtgggagctctaagtgtctctcttgggtttcattcccagcaaaccacagtgctaagcagtgccggacaccatgtgccttgaggacagcatgtggagattgcaccagcggcagctctgagtgcatgtggtgcagcaacatgaagcagtgtgtggactccaatgcctacgtggcctccttcccttttggccagtgtatggaatggtatacgatgagcacctgcccccgtaagtgaaaaagggagccctaggcacttatgcatgccctctgtataggcaacaactcagccatgaggctgtgctgtcagcctctgaacattttagaaacaagactggacatgacctctgctcaaacctgaccagagactgccatcgagaccttgctgcctattgagaaccttcatacagaatcaggcacattgacagtaaataaatgtaagatagatcacagagtacagaaataacttgtccaacttcagtgtcatattgctcaatccatgtaatatctccatatctgaatttcctaatttgtaaagtaaatgctttccaatagataatctctaaggtcccttttgccttcaacatcctgggattgagagaggagggaagggtcatctctgttatgtattgggcaaaatactgggctctttacattcattatctcttttaaataatcaagacagaataatatttttgactcaagccagttgaatagtctgttaaaaaaaaagtaaatacagtgaattcagatctacctgtgatagtcaattgcaactttttttttttaatagctgaaaattgttcaggctactgtacctgtagtcattgcttggagcaaccaggctgtggctggtgtactgatcccagcaatactggcaaagggaaatgcatagagggttcctataaaggaccagtgaagatgccttcgcaagcccctacaggaaatttctatccacagcccctgctcaattccagcatgtgtctagaggacagcagatacaactggtctttcattcactgtccaggtaagatgccttgcatatccaaattcaagtgtttcactactgatttatgaagaataaaaccttgaaagctacgttgtgtatatgtaactccctgccctcagcccctttccttcctcctaatggttggtacaagaaggaatagaccagaagctggtccaaggcctgacctggacctgctgagagtggtggtgggttcctaagaaaccaattctaagaaattggcctttgattcagacttgaagtgaccactcagcaatgtgtctgtgggtttctagaacagttgggagaggctgggctggtgcaaagactcctcagagattagcagtcaagaacttctctaagagcctgccattgacaacagggctgtttgtgaggactttgtaagggaaagtccactgtaaacaaagctaaaagggcagagacagactgggagaaaatacctgcactgcatgtaacaactgatgatcatccagaatatgtaaactcccaccctccagggaaaaaataagaagctaaatgtgaacccaacagaaaaagtggttattggagataaagaagccattctcagaaaaggaaatagaacaggaaaatgtaaactaacaccaggaaccaattttttgtctactaaactggatcaaattttccgtgttcccttttttccatactaagatatgggggacctgcaattctatttttaatctactaggagttaactttttaacgaaatatttaaatctctgctttttcatgaatatcacgaatatatctggtaaaatgacaacccagagaatgggagaaaatatttgcaaagtatatatctaataagaatccaatgtccagaacacgtaactcttaaaactcaacaatagaaagacaacccaattaagaaatggataaaggatttaaatagacatatgtccagagaagaaatacaaatggccaataagcacatgaaaagatactcaatatcattcatcattaccaagaaatgcaagtcaaagccacaatgagataccactttacacccactgagatggctgtaatcaataaaacaggtaataacaagtattggaaggatatgtagaaattggaactctcatgcaggttggcaggtcctcaaaaagttaaatatagagttatcatacggcccagcagttttactcctaggtacatacccaagaaaattgaaaacatatgttacccaaaaacttgtatataaatgcttatgcttatagcatcattcttcatagcatcatgctcaaagcaacattattcataataagcaaaagtgaaaacaagccaaatacctgttagctggcaaatggatgaacaaagtgttgtatattcatacagtgtaatgttatttggcaataaaaaggaatgaagtactgacatattttctgacatggattaccctaaaaaaacatgctatgtaaaagaagccaggtgcaaaagattatgcgttgcatgatgccatttatatgaaatgtccaaagacagaaagtagatgtttagtggtttcctagggctgggcatggaaatgaagaataataggcatgaggttttctagagtagctgcagcattattttctgacatggattaccctaaaaaaaatgctatgtgaaagaagccaggtacaaaagattatgcattgcatgatgccatttatatgaaatgtccaaaggcagaaagtagatgtttagtggtttcctagggctggggatggaaacaaggaataataggcatgaggttttctagagtagctgcagtattattttctgacatgaattaccctaaaaaaacatgctatgtaaaagaagccaggtacaaaagattatgcattgcatgatgccatttatatgaaatgtccaaaggcagaaagtagatgtttagtggtttcctagggctggggatggaaacaaggaataataggcatgagattttgtagagtagctgcaccattttatgctctcaccaacatcatatgaaggttcatatctttccacatccttgccaatacttgttactatctttttaatgaaaactgttctagtggatgagaaatggcatctcactgttgttttcatttgtattttcctgataactaatgaaattgaacatcaacttcattagttagccttttgtatatcttctttggagaaatatttagtcaaattctttgcccatttttcagttatgttgtcttttttattattgagttgtaagagttctttatgaattctgaagtcccttattggatatattatttgcaaatactttctcccattatatgggtttcttttcactttcttaatatgccttttgaaatcaaaagttttcagttttgattaagttccatgtatcaatgttttattttatcccatgtgctttttggtattgtatctagaaaatcagtgcccaagtaacccaggatcacatagatttgctcctaagttttctttgaaaagtttcatagatttgtgtgttacattaggtccttgatccattttgagttaatttttgtgtatggtgtgaggtaggggtccaaactctcttcttgcctgtggatgtggtcctgcaccatttgttgaaaagatttttttttttttttaaccattgaattttcatggcacatttgttgcagatcagttgactgtgaatctaggaacttttttctaagctctcatttttgtgcagttgaccaatgtttctccttttgccaatattacactgttttgattactgtggctttgtataagttttaaaattgggaaggctaagtcctccacctttgttcttattttgcaagactgttacagctattctgggtttcttgcatgttcatattaattttaggatgagcttgccattttctgcaacaacaaaaagccaactggtttgataaggtttgcattgaatctactgaccaatttggggtgtattgcctgtttgtttgtttgtttgtttgtttgtttgtttgttgagagagggtctcactctgtcacccaggctggagcgcagtggtgctatcttggctcactgcagcctccgctttcccaggctcaagtgattctccagcctcagcctctcgagtaactggtactacaggcatgagctaccaacacccagctaatttttatatttttttagagacagggtttcgccatgttgcccaggctggtcttgaactcctgagctcaaagcaatcctcctgcctctgcctccctaagttctgggattacaggtgtgagccaccacgcctggcccttgccatcttaacaaggttaaatcttctagcctatgaacctggaatgtctatttatttacctctttactttcttttggcattgttttatagttttcagtgtacatcattgtcttgttcctttttttaggggaaaataattcagtctttattaaatatgatatttgtttagttttttttatacatgccctttattgggttgagaaagtttccttctattctagttttttgagggttttgtaatgaatgagtgctagattttgtcaaacactttttctgtgtctacttagatgatcacgaagttttgttctttattaatactatgtattacattaattaagaatgttaaaccagttttgcattcctgggataaagcccatttagtcatgatgtatacttttttatcatgatgtatatttttaatctgctgttggattctatttgctagttggggattttgtgtgtacattcatgagggggatataagtttgtggttttcttcttttgtgattactatctggttttcatagcagggtagtactggcctcctagagtaagttggaacgtattcctcctcctctatttactggaagagttcgtcaaggattagcattaattcttctttagatgttgattgaattcaccagtgaaaccaaatgggcctggcctttttctttacaggaaaatttttaattattaattcaatctgtttgttatagatctattcagattttctttttctgagtgagtcagttttggtaatctgtttttctaggaatttgtctattctcagtaatcaaatttgttaacatacagttcgtagtattttcttttgtttttttttttttttttttgagacagagtctcactctttcacccagtctggagtgcagtgacgtgatctctgcttactgcaacctccgcctccagggttcaagtgattctcctgcctcagccccccaagtagctgggactacaggcgcacgccaccactcctagctaattttttattttgttttgttttgctttttttagtagagacagggttttaccatgtagaccaggatggtctcgatctcctgacctcgtgatctgcctgccttggcctcccaaagtgctgggattacaggcgtgagccaccacgcccggccagttcatagtattttcttgcaggttgctctttagcaatatgtagtctcctgtttaacctgttaacgatttttttttctgtctaatttggttttattattcttttacattttgcaagggctctaaatattgtgagggtttttttttttaagagcttgctctcttatattgtggatgcaataatttaagccttattgaatgtactaaaattcgtatttttcattctctcatatttcttgcattaacccttccttcaggatttgttgctgtgcgtgtttatcctggtggtattcggagattgagagttttcttatactggttaatcctcaaggttaatttgtattaataactaaatgtgtagatctgtcaatattggtcagtggttgggtgtgctgagctgttgtgaaagtgtggtatgatgtcctggaaaagctagcaagccagcctcaggacactccagctctggtccacttcgactgttgttgactggtgtgcgcatctccctcattggaagaaggaaggagcaatggacctgggtggctgggtgcaattagcatgttcatgggtgtggcaagtgcctcccagccttgggtggtagggccacctaaagatagctggcacattgccttgagttttctttcattcttgcttgcttgcttgcttttatttttgagatggagtttcactcttgttgcccaggctggagtgcaatggtgctttcttggctcactgcaacctctgcctcccgggttcaagcggttctcctgcctcagcctcccaagtagctgggattacaggcacctgccaccacctctggctaattttttgtatttttagtagagacagggtttcactgtgttggccaggctgatctcgaactcctgacctcaggtgatccacctaccttggcctcccaaagtgatgggattacaggcatgagccaccacacccagctgagttttctttcaaacactcaaatactaacaggtgcataaacagaacaagtacaaggctatggaaggttgccaagatggtgaaaaactgcatcacactgatcaaccaaggcagatctgaagaatcagattttgcttacagtgcaggttgtgcactatgtaaatgtttcccccatcctattcccccctagagttctgcagtgcacagcctgtgcagctgtcctgagcagtcctcagaggtccaagcttcatatacctttctagttgtaaagccctatatccattaggagtcttagtaatcccacttgtggaaatgtttatccgtaaagatggttatttttctaataatgaaaaatgtaaagcaaactaaatattagaatataagggaatggttaaataactgttaagattcatcaaaatcattctaccatttgaagttttgtttataattgatgaaataaggtggtaaaatagttgtgatctaagttaagaaaggtgaatattaatatgaacataattgtgcaaattatgttcttctggtatagaaaaataccagaagaaaatatatcaaatgtgaacagtggtctctgagtggttggattgtatatgatctttccccatccttctattttttaagtatactgtcatgagcatacgttattttttagtgaataacaacaaaaaatattttttaatatcactatgggctttcaccttgctgtgatacattttcaattttcctggactagctcttctttgatattttttatcttatttctcaaattagtttttagtgggccagttttggtgatttatcaaagataaattaactacagagatagttgcagataaatcttattgaacttaactacatgcagttcttccatggtacagaccccttgaaactctttttcttgcagcttgccaatgcaacggccacagtaaatgcatcaatcagagcatctgtgagaagtgtgagaacctgaccacaggcaagcactgcgagacctgcatatctggcttctacggtgatcccaccaatggagggaaatgtcagcgtaagtcaaattggtcaggtttactcatggcaaatcggtgtggaacacagcacttctatttgacttgaatatctaggaggaaaaaagccactttgttttggataccacatttcttattaaatcatactggtcagaagctcagctgagctggaagaaagaaccaaggtttcagtgtagctggttaaagcaacaagccaaaaatgttagagtcaagcctttgaccacattctgcagtggtataagcaagggcccaaaaccagagaaagtgccaacttcccctgtttcctttcctcccattgaacagggcacaggtcaatagtcagagggatcagctcagacatgggagtcttggggctcatctcactgaggcccggacaaaaggttccagcagtatatggacactaaggttgtgggaagggcaaggtgtaagggctaggactgggaaagtcctgggttggagtcagagttaggaaagtgtcttctgaattccccctcctccccccatcaggaggccttggtgcctgaagaagacctcagcccaaggcctcagatagggagcctgggaataaaggctccagggctaggaatgtgaacatgtgaaggagcgtgacccgtgaggtagacctgagtccttaactgcacctctctcagagccccacacttaggcccacctcacaggtcatgctctgccaggtaaagcctgtggcattgcctgtggtcaggcctgaaaaatcacacacgggctttttaaccaggagccagactcctcaatacttatagtgtattttaaaggtttaaatagtcccgtgttggctgggtgtagtggctcacgcctgtaatcccagcactttgggaggccaaggcaggtggatcacttgaggttaggagtttgagaccagcctgaccaacatggtgaaaccccatctctactaaaaatagaaaaattagctgggcatggtggcgggggcctgtaatccaagccactcaggaggctgaggcatgagaattgcttgaacctgggaggcggaggttgcagtgagctaagatcacgccactgcactccagcctgggcaacagagtgagactcagtctcaaaaaaaaaaaaaaagaaaaaaaaaaaagtcctgtgtttccccatttatgtcaaatagaagcctgcaagcaataggacattttattatgagaacaaaaattatgacaagtgatattaatgaactgctttttttattctagtttccagccaaaaaacataatgagtactatagtcgaaagacttttcaaagttctgagcaggaaaagtaaacaacatagggaaatctctacctactccccagatcccaactccaaactctttggcatggcccttcagaatctgatctgatccaagaccagccaggagagaggcagcgttctagctgtgtgtcccttactctccctggggttcagtttcctcctaataatagggtggttgttaagatgaaagcagagcagcacatgacacatgttccacaggatactagtcaatacttagtagatgtgggcaattcttattacccttctaatgccattctccactactcctaagtaaaagttcttgctcagattaaaaggtatttggtgaaaatgttttccccactctttgtgaatagacttaatccgttagacagtaaccagagtacctaacagagtggtggagtgtacaaggcattgtgctgttacccactcaagacacaggtgcttttattatccccaagatcaagtaaactgcccagggtctcacagtgagatgtggccaagctaagaaccacgcccagtctgtgctgaccttaattacttggctggttgtgcttccagatgccatcatacccacatcagcagctgctatctagaagcatcacattttcctctgtgagatctacagggcctgagtacaatttgccttatttttcagagtcctaatccacggtagaaagcgtggtgtttatagaatactgcagatggcaccaagtctttgatgttttcttcttaaaattgtatagtccttaggtaacgatagtagccatgatttcttgaatgcttactgtgtttgagacatcatatacatatcatcacaaacacccctatgagataggtactgttgttatccccatcatatggacaaggaagctgaaactcagaaaggttaagtagcattcccagagtgacagaagagccaagtagaggacgctgaattcaaacccaggcagatggacgtaaggcctttgcttttcactatacattacacaccttcccccagtctcaacagagccaagtgtcagacactcatgattctgacttcagcatccattctgttaatctctgcactattctgttttatagttttctttgggtgattccaaaggatttatttttaaagcatacctctctccagctgaatgcctttcatttattcaccagcaaaacagggtataaagtgaaaaggtgttgaccaaaaaggctttcacttttttcaactggagtataatatttatcacggcttgtattacgttggatgataaaaggagagatgttgagttggccagatgagggagatgggaagagctattttctgtaaaggcaaaggaaaaggtgaagcaagggtggcatgtcctgagggcccctaaagcgctgaccttggcattggatcctggttctgagccctgcggtgattccaaatgtgaccatcgtggagaaggcacctcagccaagaccagccctccttcagaggacagtcacctccagagcacctccctaggggcagcagctatgtctgtgtccccacacccagcacctggcattctagagatgcttcacaaatatttattgaatgaatcaaagaatcatagcagtgaaaaagagagtctattgaaaagatcaaaatagtcattgcttcagaaggcagtgggtaccagcattcactttcctcctgtcctttgtttggttcctttaatgttacctatacattattatcattagctgaaaaatcatgaatcttacccattgaatgctcgtactttaatctgtctttcctactgaactcaattcagataaaattgcttgttttggaaaaagtctccaatagtcagaattttttaagccagttgtgacctctgttcctttttcttctctgcagcatgcaagtgcaatgggcacgcgtctctgtgcaacaccaacacgggcaagtgcttctgcaccaccaagggcgtcaagggggacgagtgccagctgtgagtaccatactccctggaccaccagggaggaccaagaggctgtgcagctgcctgaaccccaccctgagagccacccacttccctgtgtcttgttgctgtgggctctgagggatccctgggttgattagtttgaaattttgcccattctatttcagacaggtcagtccccaaaatgaggaggtcgtcgagttagcagcaattccttaatggctcttgaattcacatttttgtttaaatgatactgacatttcctgggttgtccatttggagtagtcattttaacttcagcaactacttgatttttgtcatgtcaagagattatactctttcccaaagagtagagatggaagagctggtgttttggtgatggcatttatttggcgtttggttgtctgattgtggaaatgatcctcttacctttaacatttcccattactctagcattttccttgttgaagcatgtcaggcatcttcctggagagggtttgaagtccccatccatgaggatgcaggtgcagcagcatcaggcatgtttaaggtttcagacctggccctgcctccactgagcaaggtgctcttgaggcaaatcactgttccccccatctgtcagtagtgggactagcagtaattgtttttggtgtcctggtaggttgaaacaggaaggatagttcctcaatcaatgtataccgggctgtctcactgggaaacctcataaaatgcatgtatccgcatttactcattctcaagaaaaaacttaaaaagtgtttagtgtcaaaacactgagctgattaatcattgtaaacatcattatttcttaaataacagtagtaataatgccaccagtgattgagacatcattgctggtgctactcagcagggtttggtctgtctactttttagtttatatctgcatatatgtttactagcttcatgttgccctaaagccaatatgtgaagaaaagtctaatccaaggttaaatttaacttttaggtccacattcccttaaacagaaaaatgtcatcgagcaaaattaatcactcttaccctcagttagctgatgcaacaaagacatgaggtggcatcaagtaagactttcaagttccttcgagatcgcagatgtaggcaggtgctgctcatcaccctggctaaagggacacagcatacctgcctgggaaaggccattacccacttcccgccctttcctcttcatgcatagctgttgtgtttacctaaatgcttcatgaagtgggaggctgggttttgctgatgtttatagatgatctgtatggggaaattgttttctgagtagaacatattttttttctacagactggtgaacacttgttccagggtttaaaaaaacagtgattcttggtatttagtcttctctcacttgtgtttaaagaagagaattagtttatccagggaacataggaaagaagtgagaaattagtatttgaaaaatgttttgactgcacttttagaagaatatgtagtccacacaaaattgaaaatgtttttcattatagtaaataggtttattacatttggatttctctcattgctttggcaaatgcttgtcaattgtcctcatatagttggtgtgtgaactgctgagcagtcagtattgaagcgttcatgcatgctcttcctagactgcctgagctgagttatggtgaaggatgcaattataatggctccagactatctgtactttatataaaaggatctgtttggttttaaaatgaattcagtttctgttttaaatagcagtataaaatagtcttttttcccccccagatgtgaggtagaaaatcgataccaaggaaaccctctcagaggaacatgttattgtaagtggttttgcaattcttatttctagaagcaaagtagttcagtaaaacttcattgtttaaacgggtttgagaatagtaagtgctataagactatagcagccaccaatgaagtgttcccagacttgatatgtttacattctgttaagtttactacatataggagcactgttttaagctgttttaattgtgtttggggttaacgttaatgtgtccatagcagatagcaggagagagtagagaggcatgcatctttgtctatccacatttatgttctcttaaaactttactttatttgccattacctagttggggtcatcatatttcgtgttttaggatgtagatcaaaaacagaattcttacaatatggttgaactttttgtcattctgtctggaactgatttgtgttaaccaccttgaggtgaaaggtgagtctgacaaggtgaccatgtttttatgggtaaatgtgttttctctttatgggagaatccacatggtagaccagagtacgggaccagaaaaaaggagttaatgttatggcatatccattgtaattatatacctgctgtactgggttgaataacatcccttcaaaattcatgtccacttggaacctgtgaatatgacttcatatatatatatataaaacttctaaaagaaaacaagagaaaaacatcttgaccttgggtggggaaaagttgttagataggattctaaaagcataattcataaataaaaagtagactaatgaaactatataaaaatttaaaacttgtaggaaaaaaccatccaaaacataaaaagccacagactagagaaaatactcgcacatcatcatatatttgataaggagtttatatccagaatacatgaggaactcttacaactgaataagatgacaattccagttaaaaacaggcaaagatttgaaaagacatttcatgaaagaagatattacagtggccaataagcacattaaaaacgacttaacatcattcgttatttggaatggagattttaaaaccacagtcagatacagccctaaagtgattagaatccaacgctaatgccatggctttttagaagacagtggtaatctcatgtctgcttctgcattcagtctgttgcagtacatctttttggttaaacacatgaaaaaaacctggccttaccaggcatgcagttggaaaagggtatagtgatacccttttaatagccttttcagataattatggacgttacttgatattatgctgaaactggacaactggtcatttctttaaagcggtttgatgggttaacccaaataaaatgatactgcccacagacttgattttctttgaggaacctgggtacagctgagttaaagtgctttcctcgttacttaatttataagaaaagcagcctgtatctctaaagacctgttctattttgtgtgtgtttagtttttaaatatgcatttctttctttccatagatactcttcttattgactatcagttcacctttagtctatcccaggaagatgatcgctattacacagctatcaattttgtggctactcctgacgaagtaagattttttaaagtcttcctattttgttttgaatttgtatggatctttttcttggtcattacggatggacgtactgccttaacagtgctctccagactggagtacacgagatgatctctagaggtataggaaagaaatgttagactctacgttatctcctttccacataaaaggcaaaagtgatgttaataagatttaccaggatcttagacacagactgacattgattccacgcatacttactctgcctgtcagcccatcatggcctcatacagaaaggggactccaccatcagagggcagatagcagagcctgggtttactctctcaagagtgaccagaggcttaaagacactgctgattgaaatgccagtgatgcagccccaatcagacagcaagggaggggaccccaatcagacagcaagggaggggaccccaatcagacagcaagggaggggacactctgctcctagagtgagttcttagcctcattaggaggcaaaacagcaaaggcttagtcgggtccattaagaagttagccaggaataatttaaattgttaaaatatgtatgtaaaatgtggatttttttatctgctgtcattaacgatgaagcccaacctgccttaaggtattacctagtggtagaaggaaggccacactgcgggacatttaaaactgaaacatacagaacacgaagatgcacctgtacagtttcttcaatgaaatataaagtcatgcagtacccacttcagtatttaaagaaattttgctaaacataatggtaaattatttaggaacttccttggagatttcttacttctcatgaacatacacaaagccatttaccattacaaaattccattaacaataaatgtgacaaataatacatggaaaacaatatggcagtaagacaaagtatattgctttgttaacaaatgttatctataaacattgctaaatttaattttaaaagtagaacaaagtctatagtgtggtatgtttactatacaagtaaatgaaaataggatttgtttttaatattctatttcaaagataaaattaagaaaaaatgtactagaaaagatacattctcaaaagtaaattgctttttaagtaaaaataataaattactttaaatgaattattttatggaaaaactataggtattaatatatcatttgagtggctgtattgactggaatttttttcttaacgattttagaataagattttaacaaaagtaccatatatgaaatgtattcactgcctcataagcaagcgtttgaagtgctcaaaatctttcaggatatacttcatgccattaatgtcattaaaaaaataaatatagtagaatctttgtaatacttcttaaccaggtgggaagcaaccatgaaagtatttggacctttctggatttcccagtttatcttacgacagaatacttactagagttatccaaatgcatatgttctgtcctctataaaaccacaagcattttaagtttattgattctttctgtggaaagacatatagttgacccttgagcaatacaggttaaaactgtgaggatccacttacacgtagacttttttcaaccaagcgtggaatgaaaatacagtatttgcaagatgtgaaacctgagtatacagagggtggacttttcatatgcaagggttctatgggcagactgcggactggagtatgtgtggatttgggcatgctcagggggtcctggaaccgatgacccacgtataccaaaggatgactgtaattgttagttgtgtgctgccagcaaatactaaatacaaataagtaaacacttgagctgtcctttcaagatgaaggtgaggtcttatcagtaaatgagaaggtaaatgctttgtgagagaaacttctggtttaatgatcacattttaaaaatagctgtttggaaatgtttccattgttgtgattttgtgctattaaaatgatcaaaacaacacccttaaaaatcttattctaacctctcaagatcttttaaaaatgaataatttcagtacagtcggatgcatctgtaaaagataaaaatataacattgattagtttgcaaaaataattgtttgaccccagttaagagatgtactagtcaaatttcagtttgactaattattaatgttataatttacctaacatcaccaacagtacacttcctccactggcttaacagattcctcagcaatatctttattagtcattaagaccaaggatcaaaataaattaagttagattagccctgtgaactgctatatctctaagtggtagacaaggttttcaaaactaagaagccatactcaatcatatttctcttgaaataatatttttagtaagagaaaaatatttttcaaatcatgaatataataaaattattttttaaattaagtacatttcagctctatatgccttttttaaaggctgtttccagttttggagaagttttacactgtatataatctatgagtttagaattatatgggtttcagttataaataaatataattttgggcacttgatcaagtgttttattggtaggagtgaacttcagacatttgaaaacagctgcccagagaatccttaggagggtgattccccagcacaggtcaggagatgcaaatcactgtgctctgataggggtctttttaaaaggcactttctcatgcagttaggcatttgataaagcattaaattatgtatactttaatgggagggaataaaattttattggcatatattgcttgtattaaggaaaattggttagaaattttgctaactcttctgtgagtttctctaaagacatcataaaatgtttgtgattaagaacatttagaggagtaaactttattgctttattttaaaatctagaaattgttttaattaattttctaataatttgtaccgctcatcagcaaaacagggatttggacatgttcatcaatgcctccaagaatttcaacctcaacatcacctgggctgccagtttctcaggtaaagacatacctagagaagaccccgcaaatgaaggtgtggtagattaagaaatgtaatataggaattgagaaagcgagctcaggagacagattggtttgaaacccacccttgccacttactagctatgagaccttgagcaagtatctaaatccctctctaaaccttagcattattttattcatctgtaaagtgaggataatgatacttacctcttagaattgttgtatagattaaattaggttatacctaccagagcttgctgtggtgtcaggctcagtgtgtggttactaccctagcccaccaccaccatttctgttcttgctgtggccactggcactaccatcattgtctacattcgtgcttcggaagtgaaaaattcaaatgattcgtttcaataaatgaaaacattttaaataaaatgagattttagtaggtacagagaaatgtaacttgggaattacatcaagctctaaaagcacagctcttgctgtctgccttactgtgattcactgaagatctactgtatagaaaatctaaagaaataaaggatgaaggccaagtgctgtggctcatgcctttaatctcaacactttgggagactgaggcaggaggattgcttgagctcaggagtttaagaccagcctgggcaacatagtgagaccctgtctacaaaaaaaaaaaaaaaaaaaacccaggtgtagtgactcatacctgtaatgccaactactcaggaggctgagatgagaggatcacttgagcccaggggttggagattgcactgagccatgatcgcaccattgtactccagtgtgggcaaacagagcaagatcccatctctttaaaaaaaaaaaaaaaaaaagaaaaaaggataatcactacttaacttgataactcaacaagtagatatgggtttgaaatttgtccattaaatttacttgcaccgtgctgttaggcaagttacttaaggtttctgagccagtttcctcctgtataaagtaggatagtaaaaacaccgtcctggcagggcgtgatagctcatgcctgtaatcccagcactgtgggaagccaaggtgggaagatcacctgaggtcaagagttttgagaccagcctggccaacatggtgaaaccctgtctctactaaaaatacaaaaatcagccaggcgtggaggcacgtgcctgtaatcccagctactcaggaggctgaggtaggagaatcgcttgaaccttggaggtagaggttgctgtgagccgagatcacgccactgcactccagcttgggtgacagagtgaaactccatctcaaaaaaaaaaaataaaaaaacaccttcccaagtagagtgatgtgagaattaaatgagataataaatgaagtactcaatatagtgcttgaaatgtggtaaatggtaactatattttatcattattactattacaatactgggttttttaaaatcaaaaacacaaagcaatgagattgatgcaaaataagaatattgccttgtacacgccacttacgtttatcatcttaaaacattgtgtagaatttgagaaaagttcagaaactctcaatgaggagggacttttaagaaaaagtctgaattatcagagtatttggagaaaggcaacatctccaggcatgtgaaagatttgcaatgagccgggcggtggctcatgcctgtaatcctagcactttgggaggctggggcaggtggattacctgaggtcaggagttcaagaccagcctgaccaacatggtgaaatcccgtccctactaaaaatacaaaactagctgggtgtggtggggcgtgcctgtaatcccagctacttgggaggctgaggcaggagaattgcttgaacctgggaggcggaggttgcagtgacccaagattgcatcattgcactccagcctgggcaacaaaagcgaaattccatctcaaaaaaaaaaaaaaaaaaaaaaaaaaaaaaaagatttgccatgagtgtctcaatgaagacgtgataatgtgggctctagtcacagggtctaactcagacatggaaaaaagtccatttcattaatctttatcggcacttgaattcctggctaagggagaatgtggaacattgaaggactctctgggaataggatggagttataccagattagggggacttaaatactgtggtagctggtggtagaagggaggactgagtgaccccttgaacccctcctccctgctacagtgggttaggcagtgagcggtacatcagcattactggcatgggagtctggcgcattgccaaggaggtgtaaaggggaaatgcaaaggaattgaagtggtgtgggcaaagtgaatgccagtgcttgttaataggattctagtggtatctgtattttcatgatcatgtgtgtcacctgtttgggggtggggcaagggtggaagggagttacatggattcctggtaaaaccatttttctttctttctttttttttttttgagacggaatttcgctcttattgcctaggctggagtgcaatggcgcaatcttggctcactgcaacctctgcctcccaggttcaagcgattctcctgcctcagcctgctgagtagctgggattacaggcatgcgccaccacgcctggctaattttgtatttttagtagagacggggtttctccatgtttgtcaggctggtctcaaactccgacctcaggtgatccacccgcctcggtctcccaaagtgctgggattacagatgtgagccaccgcacccggccagtaaaaccattttggttaggggcataggcttgtatatcagcctgcccagctttaaatcttatctccatttcttgttggctgtgtgacttgagggaagttacttaatttctgtgaacctcaatttcccagtctataaatgaagataataatagggcagctgtgaggattaaatgagattgagctcttaaaggctattactggaacacaggaaatgtttgataaatgctattgtccttattattaatgaggccagattctgttctccccctagccccccaaaaaatgtctcttctctttcatgtttttcttttaacagctggaacccaggctggagaagagatgcctgttgtttcaaaaaccaacattaaggagtacaaagatagtttctctaatgagaagtttgattttcgcaaccacccaaatatcactttctttgtttatgtcagtaatttcacctggcccatcaaaattcaggtaagaagaggcttttggtctcatacctgcaaaggtggtgaaatctctttagtaagactaaatttactaatttggagcttgtggtaaatgagatgtgcaatgtggctttgcctttgtaacgtgtatggcagaggagtgctgagcacatgcatgctgcacagaagattggagtggggatggactgtatcactcatgaaagacatttgcaaaagcactgttgaaagcaagttggcatgtaacagatttggtcattataaacgtattcacttcttcagtgagcatttgccatgtgaaagcctgtagggctacacaaagaacttcaattctagagtaaggtggatgtaagtgaaacaaacccacatataacaactgaaagccagagtgtggaaagtgacatgagatgatcccagaaatgctatcaaagtttaaaggaggacaaatggggagactatgttgaagaacatcagccttctagtcagacagaggtggattgattcctggctcctatacaaatcatacagcctttccaagtctccagttctctgtgcatgtgacctgaagggtagttgtaaggggctgtgcagctgctgcagtgtcttgttagcctgctcctttcctctgttcccagggggccagtgtactccctcttgtccgagacccatggccccattttaactttttatactcatgtcacctggggcctttcctcaataccttctgcttcttaccttcttcatttaggtgaatgtggaggttagggataggtgggctttcaaggactggttcacctttaaccatggaagcatggtcactggacggaggctgttgctgtttgccaatgttcagaagcataatcaacctcagaagcaagtcaccacaaacatatgaaaaaagttcaacatcactgatcattagagaaatgcaaatcagaaccacagtgagataccatctcacaccagtcagaatgtctgttattaaaaagtcaaaaaagaacagatgctggcaaggctgtggagaaacaggaacgcttttacactgttggtgggagtgtaaattagttcaaccattgtggaagacagtctggcaattcctcaaagacctagaggcagaaataccatttgacccagccatcccattactgggtgtatatccaaaagaatataaatcattctgtaacaaagatacatgcacatgtatgttcattgcagcactattcacagtagcaaagacatagaatcaacctaaatgcccatcagtgatagactggataaagaaaatgtggtacatatacaccatggaatactatgcagccataaaaaggaatgagatcatgtcctttgcagggacatggatggagctggaggccattatcctcagcaaactaatgcaggaacggaaaaccaggtaccacatgttctcactcgtaagtgggagccgagaacacatggacacatggtggggaacaacacacactggggcctattggagagtgatggggaggaaggagagcatcaggaagaatagctagtggatgctgggcttaatacctaggtgatgagatgatgtgtgtagcaaaccactgtggcacacgtttacctatgtaacaaacctatacatcctgcacatgtacccctgaacttaaaaattaacaataacaaaaaaagcaagttatcactcatcaattaggatgccttgggactgtgactaaagaacagttgatctttccattctggaaatatggaggacaaaaactatgttgtagtttttctcaccaccctctctcctttttcctgtctccatggtctaagatttgttaatcctctcatcagcttctccctttgccctcgcatactccctgtgtccctcctcagccagtcttgtaagcatcagccacgcttcttattcctgttttctcttgtctagtcacacatctgctcacaatggtctggcctcttccctcaccacatcctgaaactgtcctgtcatagtgggccccagtgatggaatttttcagtcccctttttatctcattgcatggctttgaatcatcatctttcttgtcttcctggatttttcttttcctcgttttctggccagtctttttagggaatcctcttcctcttccttaaacactgggcttgtctaggattcagacctggtccttttctctcttcactgtttcctgcatgtgggacttgtggtgccacatctattctggtgattctcagtgctgtctccagaccggcactggcagttgctgcctggacagccctacctgggtagtcaaagctccctgcgttcggtgcatattccttcttgtgatcttagccccagacttccatgcttcctttctctgtaaacagcaccaccatcaccctgttgtacaagctagggcctgatgatcatttgcattcctgggataaacccaacttgagcatgacgtattatttccttactttacacgttgttggattcagtttgctaatattttggttagaattttgtatctatttcatgagtaagaatgtctgataattttcccttcctgtccttgttatggttttgatatcatgttaaactaacttttaataattataatttgaggagttttcactctttctcatctctggagatgtaagattagagttaactgaacctcaagtacttggtagctctctcctgtaaaatcatttgatcctagtgtcttatttgtggagatactttttagctgctgattcagcttctttaatagttataggatattttgaatttcctctttatttgattccctttttaatattttttctaggtttttatatcatgtttttaaatgtatttttaattttactttttaaattgatacataattgtacgtatttatgaggtacatgagatattttgatacatgcatacaatgtataatgatcaaataagagtaattaggatatccatcacctcaaacatttatcatttctttgtgttgagtacatttcacatcttctagctattttgaaataatgaataagttattgctaactatagtcataatgactattgtgccattgaacactagaacttattccttgtaactctatttttatacccattaacctctatctccccagccccccagcagctggtaaccaccattctgcactctacctccatgagatcagtttttttagctcccacatctgagtgagaaaacatatctatctttctgtgcctggcttgtttcacttaacataatgacctccagttccattcatgttgctgcaaaggacaggattccattctttttgtgactgaataatatttcattgtataatatatacaacattttatttgtccattcatttgttgatggacacgtaggttgattccatgtcttcactcttgtgaatagtgctgtgataaacatttagagcatgcagtatctctccagtatactgattttctttcttttggatatatacccagcagcgggattgctggatcatgtggtggatctattatgagcagtcttcatactgtcttccatagtggctgtactaaataatttacattcccaccagcagtgaactagtatcgtctttctctgtatcctcgccagcatctgttattttgtctttttaataatagccattttaactgggatgagatgatttctcattatggttttgatttgcatttgcctgatggttactgatgttgagatttttttcatatgcctgttggccatttgtatgtcttctttggacaaatctctattcagatcatttgcccatttttaaatcaagtttttttcctattgagttgtttgaattgctggtatattctggttataaatcccttgttggatggatagtttgaacatattttctctcattctataagctgtctcttcactctcttgtttcctttgctttgtagagctttttggcttgatataatcccatttgtcgatttttgcttttgttgcctgtgatttcgacatcttacacaaaacatctttgcccagaccaatgtcctgaaggattttcccaatattttcttctagtagttttatggttttaggtcttatacttaagcctttaatccatttaaatttgatttttgtatgtggtgagagagaggggcctagtgttatttttctgcacgtggatatccagttttcccagcaccatttattgaagaacctgtcctttccctcactgaatattcttgactccattattgaaaaccagttggccgtgaatatgtggatttatttctgagttctttattttgttccactggtccgtgtatctgtttttatgctggtatcatgctgttgtgggtactatagctttgtagcatattttgaagtaaggtgatatgatgcctccagttttgttctttttgctcagaaatgctttggttggctgagtacagcagctcgtgcctataatcccagcactttgggaggccgaggctggtggatcacctgaggtcaggagttcgagaccagcctggccaacatggcaaaaccctgtctctaataaaaatacaaaaattagccatgtgcagtggtgggtgcctgtaatcccagctacttgggaggctggggcaggagaatctcttgaacccgggaggaggaggctgcagtgagccaagattacgccactacattctaccctgggcaaacaaagcgagactctgtctcaaaaaaaaaaagaaaaaaaaaaaaagaaatgctttggctatttgaggtcttctgtggttccatacaaattttaggattgttttttctatttctgtgaagaatgtcattggtgtagagattacattgaatctgtaggtagcttttggtagtatggtttttttcacaatattaattatttcagtccacaaatgtggtgtctctttcaatttttttgtgacctcttcaatttcttacatcagtgttttatagttttccttgtaaagagggctttcacctccttggttagatttattcctacggttgtttttggaagttttaaaaaaatctatcgagaatgggattgctttcttgatttcttcttttgctagttcgttgctcctatatagaaatgattctgatttttgtgtgttgattttgtatcctgcaactttactgagtttgtcagttcttagtttggtggagcttttagggttttctgtatataagattatatcaactgcaaatagggacactttgacttcctcctttcagtttggatgccctttatttctttcttttgcctagttgctctggtcaaatatgttgataacttgttgatgctgtcctctaatgctcgcagcgtctgtgttcatgaaaccctttgttgtattccaatgttgatagcattattcacagtaatcaaaatgtggaaacaacccaaatatctatcagtggatgaatggataaacaaaatgtggtatgtatgtatgtgtgtgtgtgtgtgtgtgtgtgtgtgtgtgtgtgtataaaataaaatgttattcagcattaaaaaggaatgaaattctgatacatgcgacaacacaagtgaaccttgaaaacatgctaagtgaaataagctagttgcaagaggacaaatattgaatgattccacttaacatgaaatatctagagtagtacacagattcttagagacagaaagtggattggaggttaccagcagctagggggagcgggaaatagggaattactgcttcatggttattaaagagtttccctttggggtgatgaaaaagctttggaagtaggtagtgatattggttgcacaaaattgtgaatgtaattattgccactgatttgtacacttaaaaatggttaaagtgattttatgttatatcttactacaataaaaaaagtctttaaaaatcacagcaagatgtttttgtagatatagacaagcttattctgaaatttatatgaaagggcaaaagttctagaatagctataacaatttagaaaaagaagaataaaatgggaagaatcaacctacccaatgttaaggcttactatttaggtacagtaatcaagacattgtttcaggtagaggggtagacacacagatcaatgggataggctgatctataggtagatcccagaaatagaaccacataaatatgtccaactgattaggatttgattttgtttgtggtgtttttttgagacagggtctcactatgatgtccaggctggtcttgactcctgggctcaagtaaccctctcacctcagcctcctgaataactgggattacaggtgcacaccgccacgctagttccagctgaatttttttttttttttttttttttgagacagggtctcactttgtcgcccaggccaaagtgtagtggtgcagtcacagcacactgcagcctcaacctccctggctcaagtgatcctcctgcctcagcctcccaagttgctgggactacaggtgcataccaccatgcctggctaattctttttttttttttttttttttttttggtagagatgagatctccctgtgttgcctagtctggtctcaaactctcaaactcctgggctcaagtgatcctcccgccttggtctcccaaagtgctaagattacagacatgagccgttgcgcccagcccccagctgatttttgacaaaggccctgcaaaggcaattcaatgaagaaaggatagccttttaacgaatagtgctagagcagttggacaaccataggcaactaaaggaatctctaaatctcacatcttatataagaattaacgcaatattgatcacagatctaaatgtaaaacataaaactataaaacttttagaaaaaaatataggagaaaatctttgaatcccaaaacgaaacaaaacctttttagactcgatactaaaaacgtgattcataaaaggaaaacttgataaactggaccacataaaaccaaaagtttttgctctgtgagaaaccctgttatgaagatgaaaaggcaagctatggactgggagaaaatatttgcaaaccatatttctgggaaagcacttgaatctagaatataataactctcaaaactcaacagtaaacaaacgaacaattcagttagaaaatgggcaaaagacatgaatagacatttaaccaaagaggatatacatatggcaaataatgacataaaagatgatcggcatcaataaccattagagaggccaggtgtggttcacacctgaaatcccagcactttgggaggccaaggcaggcagatcaccacttgaggtcaggagttcaagaccagcctagccaacatggcaaaaccccgtctctactaaaaatacaaaaattagccaggcatggtggcacatgcctatagtcccagctactcaggatactgaggcaggagaatcgcttgaacctgggaggcagaggttacagtgagctgagattgtgctactgcactccagcctgggcaacggaatgagactgcctctcaaaataaaaataaaataaccattagagaaatgcaaattgaaagcacaatgagataacactacacacttatcaaaatgactaaaattaaaaatagtaataacaccaaatgttggagagagtggggaaagattggatcactcatacattgttggtgggaatataagatggtacagtcactctggaaaatactttgtttcttaaaaaactaatgttatacttatcatataacccagcaattgcattcctaggcatttatcctagagaaatgaaaaccagtgttctcacaaatctctgtacacccgtgtttatagcacttgaaagcaatatttaacagctttatttataatagcccaaaactggaaacaagccaaatattcctcaacaaatgaatgcttaaataaatgatgctacatacacaccatggcctaatacccagcaacaaaaagaaatgaactgttgatatacagaaacacaacaactttgataaatcccaagcaaattttgctgattgaaaaagaaaatcttagaaatttatatactgcatgattgcatttatataacatttgaaaatgaaaattttagatcttatatacctatgcacatattgaataagtatcctgaagcttcaaatttctctgacttcttaggactctgatctctagaccctgttttaaaggagcttatctgattaggtcaggcctacccacacaggagtagggaagatacagagcgtgcccatcaagaggtggaaatcttgggggcattcttagaattctccctgctgtaggctgcatttggaatagagcttgcaggggtttcggtagtttctccgatccgaaagaggttgagctctaggttccagtcagtataatttcagtttggcaacatctcctgacactattaagatatagattatatatatttgttaggttattttcatgtaaacacttgattagggttctagtaaataaaatttatttatttactcattttaagttgagattgtttttgtactgacatacctctccatattctcaatctaattgaacatcgtgctttgttgcttatagctgacaaatgattaatactttttagattcttagtgaaaatcttgacttatgctgctgacacttttcccagtctgtgcctataagcaggcttttgtgctggagatggccatacttgttgccaatgccgagtttttttcctcccagttccctattgctccaccctctgaaagtcactgaagtggttttagagctttcattctagagggagctcttccccacacttacttctaagaagtaataattttaagtttcataatcaaggagatgttgattttcttcctggttttctggtgctccttatcttttctggatcactaacttaaattaagatccacttatgaatgctgcattcaggagcacttgtgaaaataaacgatggcatgcccaccatttagtttgccaagctttccttgaaaacgcaggtaagttctattgcaaacgtgtctttttgctgtttggtacaaatgactgcactattcactgtgactaggcccgtgtcaccgtgtgttctcagtcctcgcatgagagcctggttgacactggttctctctgctttggggaccgtatctggctgtgcgctatgtggagggctgagctcgtgtcttcctgggtaaatacatcatgttctcaacaagggctgcatgtttctttattgctgttttttccccagagacttagcttttctaggtgtgtagcatggctcttaaatacacacatttagcaactgtgcaaattcagtaaaaatggagagacttatttaaggaagacagtagggaaatgtctaaatagtgcagtgtaggccattcagttaaatttcagtatggctttcgatgcaggcaaagccgttttgcctttgattctcattttttaaattagattttaaaaattgagattctccttttttaaatgagattttaaaaattgagattctccttttttaaatgagattttaaaaattgagattctccttttttaaatgagattttaaaaattgagattctccttttttaaatgagattttaaaaattgagattctcattttttaaatgagattttaaaaattgagattctcatttttttaaagcaaagtaactgaggaaatctaattctctagttggaaatttgtgtaagcattggggctttaaaaatggtaatactaaactcaagttccttcactctgaaccaatcccaggattcttttccataattaggaacagatcaaaacctataactgctgagggaatttgaaactgactataaaaatctttgtagatgcagctaaaaaacaaacaaaacccacagactgaaaagtcctgtttctgggagggtggcgggtgtgttggggccggttgtgcctgttttttgattggttgttcctgtgggtgagcacccttccctctgcccctgctttctgaaagctatcctagttgttctccccagtaagccggggctcagccggcttcagctatgtccatagtttgggggcgtgggcggtaggtattcaagatagaagatggttggacagaaagtgtgtgaggtgggaaggtggagtggtgaggctctggctcgttcccgactctgcaacagaggttgttactgtaatgtggagctaatatagaagtctgcgtgctgggtgtttcatctactgttttatgtaagaggccagtgttcacaagtaaaggcaacacagaattggtattgagaactgggcattcatttagattttagagttctgtttatgggtgctaacaggatcgctatactgagcaagggatgtgtgaaacttttgttcacttggatgtgctttttttcttataacagctttattgagacatcatttacataccatacagttcgctcatttaaagtacacaattcagtggttttcagtgtattcacagaagcgtgcagccacccgtcactacagccaattttagaatattttcaccacttccagaagaagcccctagcagtcagtcctcattcccccctcttccggcaacccccagtctgtatttcctgtctctgtggatttgcctattctggacattttatataaattgagtcacatgatatgctctcacttagcatactgttttcaaggttcacccgtgtttagtatgtttcagtacttattccttgtcatagctgaataatcttccttatatgtatataccacgttttgtttatccatttttctatcgatggatgcttgggtggttttcactctttggctattatgaatagtgtcagatatacttttaatgtttatatttattgtataataacagtgcatatccgtacctcctggtgttaattgtctgtatcttaagagttttaagaattatatggttgtgctgtaattctagcacttagggaggccgaggcgggcagatcgctttagctcaggagtttgagaccaggctgggcaacatagtaaaaccctgtctctactaaagtacaaaaaattagctgggcgtggtgaagtgttcctgtagtcccagctacttgcaaggctgaggcacaagaatcacttgaacccaggaggcagatgttgcagcgagccaagattgcaccactgtactgcagcctgagcgacagagcaagactcctgtctccaaaaaaaaaaaaaatttttctttatgatgaaacccacaaggctgtacaagaaccttaaatatagtttgaaacaaagaaagacacatgcttttaagtacagtttaattcttttcttttttcttttttctttttttttttttttggagacagagtctcactctgtcgcccaggctggagtacagtggtgcaatcttggctcgctgcaacatctgcctcctgggttcaagtgattctcgtgcctcagccttgcgagtagctgggactacaggaacacttcaccacgcccagctaattttttgtattttagtagagacagggttttaccatgttgcccccatcattctcagcaaactatcgcaaggacaaaaaactgaacaccgcttgttctcattcataggtgcaaactgaacaatgaggacgcatggacacaggaaggggaacatcacacaccagggcctgttgtggggtggggggaaggggaagggatagcattaggggatatacctaatgttaaatgacgagttaatgggtgcagcacaccaacatggcatatgtatacatatgtaacaaacctgcatgttgtgcacatgtaccctaaaacttaaagtataattaaaaaaaaaaaaaagaaaaatgtgttattcctttgtctcgaaagtcccctgcttttcagctttcgctttggttgtctcttgtcagctctttaatgctattgttcccttgggtttcatctggactctttttccctgggcaatctcatccacaccatctgggaacattgcctttggctggacaggtaaatctttgtctctagcagacttctctcctgtgatctccagagccaggaacccactagacttccttaaaattcattcagccagcagactttctggcccagagcagcagctgtgagtggacagcaggcacctcgttagaagctcggtgttggaggtgtgcccatgcattcctgggagccatgagaggggaggggagtgccctgtgtcacctgagtccaagttaagagagatcacaccagagctgattcctaaggagcatgggggcgggggaagggggtgttcgtggtggggaaaggaaatgaccagccctttcaggaactaccaggagtttagcagagctggtgacagtgctatgagcaagaaggtggagagctggggagggccattatgaagagactggagattgcaggctgtgaacttgagtcctgatgtgactgggaattgttgagatgttttaggccgaaaagtcaccgacgatcagtgtttagaaagaccccactggcagcagttgggagtgtggattggaaggagccaggcctaagtcctgggaggacttaggaggtccaggagtccagggagtccaggtggaattcttgtgtagaaacccagggaaggggaccatctgatgacacacatcccatagcaacttcctttcctcctctgcacctccacagcagagtgtctgtttccactatacgaagatttcttaatggcaaggatcgcatttttatccctcagtgtcctcagtgtcatgtgctaatcagttggagatactccctaaatgtatgccagatgagtatatagttgttagtataagggctttacggtaggtatcagaactttttcttttttacaacttttataacttttataaaggagccgacacctttttctgatattgtcagaacaattgctgaccagtgctatgggctggctgaggttggcaaccaagaatctgttatctcagtctacacagcgtggagttagaagattggattgttgttggttagaattttgtccagagagttagaagatagaagaaaagggagggctgaggacataaacatccaaattttacaaagaagaaagttcagtgctcctgtcaatattgaaatagttaagagggaaatgattgggtctggggaatgcttcaaaataatatgatcatagggaaagtaagtgtagtgtggatgaaacaaggttggccttgagctgataatttactaaagcaggatgatgagcgtgtgaggttcattatagtgctctttctactttttaaaaagcttaagattttccaaaatgaaaaagaagctgagcatggtagctcatgtctgtaatcccagcactttgagagcctgagacggaaggatcacttgaagccaggagttcgagaccagcctgggcaatatagtgagacccccatccctactaaaaaagaaaaaaaattacacaatgaaaagaataatacaggtggtagaagaagaaataaaggtatgagtatatgatttggcctcctacagacagctacaggagcatgcctctgctgggcgggcctggagcatagtgcaccctggagctgaagttctgttcgcctttacaggaagtacacagcattgtacgggggttttaccagttaacagtggacagtctctagaacactcaggggtcaggggcaaaactccctctccctcaaaccagcccacctgtcttggtgagaatggaaaacggagcttcccagcaagcctcctgccttcaccccgacgcacaggtgcatcagggtctgagggctcctccctgtggggcctgggaagccgcccttcagtgggctatggctgcattgtcttctgatcttgtagctgtgtgtgggtaacaggcacatcgtctccccatatcccagagagtcatgtccacttcctatctgtggtggcatctttccatcactgtcaccctcaggataatggcacaggaactaacagaggcactaagagcagtgatatatactggagggaggggcggggctgatgaccaaaatcaccttctgtttcagtaagaggttggttaaagtgatgcctaaaatggatagatcaggaaataacaataaaaacattaatgataaaaaggcaactgccagaagaactgaaaagtaacctagttcaaggtgggggtccctggagagaagccttcagaagagcagaggaagagcagggaacattgcttttcatgactagcctttcagtaccttttgatatttcagctaagtatgtagttctctaatgatttctaaattgttaatgagtgtgatagaataggaattctggagaatggtcaaaaggaattgctaggagaaaattagggaaagaaagcacagagcagtattgaggtgggaggttgggagcagacagatggtgagtgttcgtttgcatggcaggaatgagtggctgaatggcattaactggccatggggctctgaccagagcttgggtatacagtttctgtgccagcacaaaccagcattaggtgcgtggtgtgtgaggccgggtgatggtcatatggatctggtccagagctgtggtcttgacatagagttccatgtatgaactttggtggtggtggtggttttgtttcgttttttaagaaaaaaggaagagttgttttatgtcacagccaaactcaaggaggtgacagcacaagacccaggttagaatgtacttagccagggctcacggaatcttccatcctttgcaaagccaagaagagtagaggcctcaaggagaatagaggagcacatgggctccttctgggctgagctctcacccttggtggggccgctggtcccagggggtcgttgggagcctgcggagattctgcccagtacatacataccttgcgttttctcggagcctgacaggtgctgccttgaagcggaaagacttcacctcacagggtggccagctgtcctttctcttcctctccctgtcttgtgtgctcatgataatggatagatagacatctccatggtagaaataatgcagccctttctgcagtccatggttccacagcatatggtcagtagacttagatgagtgctacataaagtgtaattagttctgcaccacggtgtcttaccttctgaaaaggaaactctggtattgacttagaaatgccagttttatccttccgaccagaacgcaagtcctgaatgaggccagaggccaatgaaaggtcctttcttctctcttttcaaatctgctgtattaaacagtgacttttcctagtcattcagtattcattcattcatccatttattcaagtttttgagtaccttctttgtggatggcacatagtagatgcaaaaatacaatcatttttaaaatggaaagcatttgttatgtggtagtggaatataagaaatgccatgcttccatatttttatggtaatcttggactcaggttctacccaccatacttaattagaaattcattctcagcctctgttttggcagagacccattctcttccctcaggaacatacagaaacctcagggctgaactgagctcagaggttggggaaggtcccctggtctgatcttcagtcgctgactgctgcgcccgattccctggcccctcactcttgagggcagcatcctcactcttgtgtggcacaggcttggacatagaatgacacttaagcaccagagcctccctagcctgccacaaggacaccctacattcccaggcactttcagaatgcaaaacctcccctccattccctccctttccctgcctccaggtttgggccctgcctctccttttgtttcaaagcactgtcctctcttcctctacccttatccttccccatctccctcccactccccaaaagagccaaactaattatggggatttaaccttccaattaaaggcgaggatttttttttttcaatgcagttcctgaaatgctaaagaaattgtccagggaaaggagcacaggaggagttttgttttgttttgttttgttttgttttgttttgttttgttttgagacagtctcgctctgtcacccaggctggagtgcagtggtgcgatcttggcttaccgcaacctctccacctcctgggtttgagcaattcttgtgcctcagccccccaagtagctgggatcacaggtgcacaccaccacgccagctaatttttgtatttttagtagaaatggggttttgccatgttggccaggctggtttcgacctcctggcctcaagtgatccacccacctcagcctcccaaagtactgggattaggcgtgagccactgcatccagcctgatgtttaaataatttcttacttcagagtttcctgaagtgtggcctatggagactagcatcagaatcactggaggagcttaaagatatagagacagggatagggcctgagattctgactttgttgtaagctatccagagtttgagagccatggcctagttcttggaatacaaaagtgtatctgctcttgtatgggaggtaggaagttaccttttcattcattcttctacaacagtaatttaaaagttaggaattggtgtcttcatagacagaagaatgcaggaatcctcttctcaggatgtctgtctttacacagccatggtatatggtagaccaagtttgtccaacccatggcccgcgggctacatgcagcccaggacggctttgaatgcagcccaacacaattcataaactttcttaaaacatgatttttttattttatttttttttaagctcatcagcactatcgttagtgttagtgttagtgtattttatgtgtggccaaagacaattcttccagtgtggcctagggaagccaaaagattggacacccctatatagaccataattatcacacgccctgagagggaagcagatcaatggtgagggagcgtagaggagagcctgccagagtttccagtggggccggggatgcttaaaaacggaggcagtgatgtgctgagccagaaaggacagggaggacccccatgcacacaggcagggaggctctctggtgacatctgccgtcaggtacagtagtacagtagtagagtgagcggaagcacttttggctgaagtgcaacattagtgattgaggaagtgcaggtccgtaatatcttaccccaaaccctggggctcactgagcttccgagttcagagtttttcagaattgatgaacacatccagaaggcccatggggcagatacaccttagacatattgatgaaagtggagttggaattgggttgtggaagtcgtaggacgtgaattctaggtttcttggagtgtggagtatggtgtctactgtttggaaacagagaagaatgacattatgagttttatttataaaataagaatttcttctttgtattaaaatagatttttatataggaaattttcattaccttcagtatcagaaaggcccccaaatctatttcaccgtttccataataaattgtgaaagaaagatttgattgggatattgtctttaaaaatgaaaccaaaaagtatgggaaaatactttaattttagagttaacaacatttatagttacaatcatgaagcaggtatggtgctgcttcatgagccaagttcataaaagaaaaaaaaatcagatcttactgagttctgtgagacagatcattatttttcttattaacatattcatttattcagcaaatgtttattaagtgccaattaatgtatcagtggctgctttaggcactggagatatatggtcagtgggataaggggaagtctctgtcttcaatcctcacagatcttattttccataagtaagtgtacaaatacgggctatgaattaaatagagcaagataaagagatgggggtgtggcttcagttgtgcacatggtgcccagaaatctgatagctccatcatggagtccttcacttgagacttcacagcaggatgtaaaaagcaacagccaggaaactccttagttttcccaaagtcctcccttaatctcgtttagagaattatgaaacacttcctatggcttcatcctttatcccttcttcagttgataactgaagggctaaatctgccaagtcttcctttgccaatggttttgtgcgagcagttctccaacagcgcttccactaaaatcttgtcttttacaagatggattttacagttggttggcattgtatgacagtctgtgagtagggacagcccaatgtatgtttgttaatcaagtttatgccttttacattgagtaatttttaattacctcgtgtaatttttaacagcactctccttcatcttcagaagtgttcagtttgaacaataagtttgtcatcttgtcagtcaaaggttgaccaacaaagactgaccgcagtgggcggggtattcagcagggttagatgtttctaagtggtcagtgctttcataaacattttcacgttatgacctttgcctcctcacacaatcttgtaactatggagacttagatgataaagattcaactaagaggatccctttaaagtcttgggtaccagccataccaaaagctgttttatatgaggttctttatgattataatttggacatgaacatggagtggtcctgcttcagcaagaaatcaggctaataaccattagcatccagtgtgggtaaaggcgggggctgccctgaggagtgttgtgtggcacagggcgcatgaacaccagataagtcctcagacagtgcccttagcatccagtggtttttggcatctagcagggagtaaaagtatctcatagattctttaagtgtaaacaccgaggacacacttaacgttttaaaagattgaaatccagacagggctggggtggactctaatctgtttccttctctctctttatgtgttataacttggattcttcattccccaaaatgaccttgtttatataattctccagtcttatctaaaacttttatgtgaggaccatggctcatattccgcagctttccttctctcaaggagctaggactggttattgtgataaatgaaggaaaagaaaagaaagtgggtttctgtttattgtatgaaattgatgtaactttgtatttctgattataaatggtagccagagggaggacacaaaaacttcaaattccaagccccataatatattatggcctgaatagtgttggaatttatttatttatggaatgtcaaaaagaaaatagggccatcaaaaaagcaaacagtggaagtctattttctggcccctgtgagtctggctctaaaaacagtgcaaggggttggggtttggtgggactaggaaagcagatgctcgtcatttaccttcctgtgtttgtcatgagaattgtctgtactgggattgtcaccttggtcagtaattgtttcgtttatagtaccattgtctctccaaagagggctgagttccctaaaaaaaagcaggcagcgcaccacaacatctggctagtagcacgtatattatcggtgatagtaaggacacaattctcgtatttaatcaatttggaggtatgcattttttcgtgggctaatatccctgaaatcatgatgcatcttatggtcagtgacttaaaaagcattatgtcatagttaaattgacagtgtttttcctaaattatacacagaataatgcctttttcagccaatgttattttagagttgatgaaatatgttgcatttttatattcttggtatgaagactattaactgtataataaaattatttaagttctgatgacgtagtgtcagatgatgttcagtgtagcaaaacgcgaggcacaattttttgtaaaaaggacaatatcttgcagtcagtacacactgagtacataaatgttgaccaaatgaagagcacagaatggggctgcccacctggaggcagagccatgaattggtactgaggcaaacaaggagagctttgtgtgtgggtggaggcgcagggagggagcgccaggcttcatggaggcatgcgagggtctccagggtcaaacagacagaacctcagaactggtgtgaagcttagaaggggctgcaggaggctgtgctaaagcctcagtgtattgctatgggactggcaactaaacaagtaaactaaaggggtgaggtacttttccttaagtgaaaaaagtttccttaacttctttaaaatgtaagctctgttttcagcttaactcttgaaatgagaagcgtgaatccgtggtggtttcatgacctgcataatcacactacctgtttttctgtcacagattgccttctctcagcacagcaattttatggacctggtacagttcttcgtgactttcttcaggtaattttgcttatacagactctctctgttcttttgatttaggcactagatccattaatagagtatcagctcctaaaagataaaaagaataatcctgtgtttccaccacagattaaatttacttcatatgtgttcctgaaaagttagatgtcagttacagtaatataaactcaatctagcatgacaaagtgaaaacgtttggtttgtatgttctggcttccagcggggggctttgcatgtatcctgtattaattttgcatgcatcctatagataatttggctcttcatatggggagaatttgggactaaaacaacatttaattaataatggttactgatgtgagctacacatatgcttatgcttgttcaagagatgattctggtgattatccaaagttttaaagctgaaagtgattttttagtgccctgggattttcttttatttccatagtttttttcgtagtctaattttatctttatgaaaatactatagacaaataattgaaaaagacaaaaaacgtgctgcagtttttaaaacagaaagcagcaatagcctgccttgcgccttccccaccccacgtcccccaatttaaattgttttgttttttacttctctgtgtttacacttggtttttcagttaagttctcttttgatgtcctactgtagaagatgaggatatactgtgttacatggcctcccctagcatctcccctcacaccacaaaagcatacaaaagccccatctctttcatttaataccattgtatcataatgcatggctaaatcagtgatccctatctatgttatggccataaaactcttattcacagctgcattgaacagtgattacactaccacattttttgggtagaaggatcattctttgcttatcctaaatgtagtatttgccatgttttggctttttaattgtttgatttttctatgtgcctacccctgatttatcactatactcttgctgatgtacctttagaacagtaaaaaataaaataaaataaagtatcattgtactgtgacagaactgaaaaatctcacaatggtcacacacaggaaggtgctctcttggtttgaatttctctcggagttgcccaccctagaaccttcccacctcctgcccccaagtgcacttgttcctgaggcctgctgcacaactgtcatttggaaacttcctttgccttcctcctatattgaagtctctgtttcccagatcccatgtcttcaccttcctatccattccctctttttactggagcacattctctagatttatgagaaaagatgcctgggagataacttttctgtgagctctcctgactgaaaatatatttattttatcctacaatttgattgaatttctgggggcaggtgctatggctcacacctgtatttctagcactttgggagaccaaagtgggtgggtcacttgagctcaggagttcgagaccagcctggacaacatggcaaaaccttgtctctacaaaaaatacaaaaattagctgggtgaggtggcgcaagcctgtagtcccagctaatcaggaggctgaggcaggagaatggcttgagcctaggaggcagaggttgcagtgagcggagattgcaccactgcactccatcctgggtgacagagtgagaccctgtctcaaaaaaaaaaaaaaaaaaaagtctgactacagaattctaggttcaaaatcattttccattagaatttagaagacgttatactattttttctagtgtccagtataatattgagaaggctagtgctgttataattcccactctttgtatgggatccgttttctctcttaaaaagaaaagtatatttaagtgtaatataaagttacagaaacatttgcaaatcctatgtgtgtagctcagtgaattatcacaaattgaacacttctagagtattgataatattatctcttgttcacccagaacacttcaggcttcttatttcttctctgtcagtttcggcaagttgtatatagttttcttctaatgatcccattccatctgttccattctcttgttcactgagaacaagagttaatattaccaatactctagaagttcctcttgtgtttcccctcactcacaaccccctgcctcttccccaaaggtaccatttacctgacttctcaaaccatacattgcatttgctatttttgaaatgcatatgaattatttctttttttttttttttttttgaaacttagtctctctctgtcacccaggccagagtgcagtgttgtgatcttggctcactgcaagcaaccgccgcctcccgggttcaagcaattctcctgcctcagcctcccaagtagctgggattacaggcacgtgccaccacgcatggctaatttttgtatttttagcagagacggggtttcaccaggttggccaggctggtctcgaactcctgacctcaagtgatccacccgcctctgcctcccaaagtgctgggattacaagcatgaaccactgcgctcagtcaaaatgtatataaatgaaatcacaacataaattttaagatgatttggttgatgaagaaaatactgaaaacttgtgggttgcagttaaagttgtgcttcgaggttatagctgtaaatctgtggctctccaccttagctgcacctagaatcacttgcggagcttttgatgtccaagccactcttcagaccatttgactcagaacctctaggggtgcaccccaaacatttgaaaactctccaggtgattccaatgtgcagctaaggttgagaatcactgctttaaaagcacatattagaaaagaaaaaacattcctctcaataactcagaactgctaattaaacctaaagaagtagaagaaagaaaaatataaataagagcaaaaattaatgatctaagggaagaagtacagtagagaggatcttaaaaactgtcagttggatctttgaaaagagtaagaataatattgacaaacccctggcaagattaaccaaggaaaaaagagagaaggtatatggtatatgtagccaatgtcagaaataaaaaagggggcattcctccaaatcccgcagacgtttttttcctccagaagggtatttgatgaacaactttatgtgaatgaatttgaaaatgaaacagatggaatgggaccattaaaagaaaaatatgcaacttgccaaaactgacacagaagaagtaaggagcctgaatagttctgtatccatttttaaaacaacactaatttaagttttgtcatagtgaaaactctaggccccaggtggcttcattggtaacataacctttttaggccgggtgcagtggctcacgcctgtaatcccagcactttgggaggccgaggtgggtggatcacgaggtcaggagatcgagaccatcctggctaacacggtgaaaccccatctctactaaaaatacaaaaaattagccaggcgcggtggtgggcgcctataatcccagctactcgggaggctgagacaggagaatggcgtgaacctgggaggcagagcttgctgtgagccgagatcgcgccactgcactccaacctgggcaacagtgcgagactccatctcaaaaaacaaaaaggagaatactgtgatcatcttaatcaatggaggagataaagcatttgataaaatttaatacccattcatttttaaaaaaatttcttagaaaactagaaagaaacttctggaacactgataatggaacaacataaaaagtcaacagcaaaccactttcttaatggtagaatgttagaagtttgagtttgggaacaagacagagatccactttccacagtttcaattactcagggtcaaccgtggtccaaaaacattaagtggaaaattccagaaataaacaatttataagtcttaaattgtactccattctgagtagtgtgatgaaatgtcgtgccatcctgcttcgtcccacctgggataggaatcatcccttggtccagtgtatccacgcccctatgctacccacccactagtgtcttggttatcagatctaaaaatcatagtatatgtagggttcagtactatccatggtttcacgcatccactgggaggctgggaatgtaaccccacagattaagcaggacactatattgccaaatccaaaggatactttttggttctcctcttcttgacttctcggtgatatcaaccaactgactgcttcatgagcgagactcttccagccgtctctgacccatgctgccctactgctgcttcttagcctgcctattatgcaatcttttctattcagcctctcactgttgattttttcccagaccttgaccctggccgtcttctcactctgtgttctctgactggactctgccttccccatctgcagcacgacatgcccagaagtgaccaattccatccttcctcaccggtgttccccacctcactaactggcaacatggctctgctggttccaagccacttctcttgctttcactcagcaggcactcccttaccaggccccagagctgtggccgtcagtgcactctccacctccactccccaccccaccaaccctagcatcacagtctcgcctggaccttttcacttgactttggcccctccagaatccacaaaaagtccagagaagacctttaaagatcatgtatctagccccttaccttcctgtcgtatctaaaataaaattcagcgtcctgggtgaactggcgtccgcttttccatattcagcttgcactcttctcttccacatttctgctaccaggaccatctcctatgtcttcaaaagcacaagctctttccctacactgagcatttgtacatgcttatcccattttctggaacactcttctcactacccttcattctgtatactttcataccttgcttgatttttccagacaacaacaaattctccaattctctgacaccaactcagtgtctcacagttcagttccattcagacactacccatagttggagcaaatcctgcaggttaggggctcagtcccacaagactgctcccacttcagacactaagcacaaatgggtccccaggctacctcactgctactgggccaactacaaattcagggcttctggtgactgctcactccaagatttgacaatttgttagaacagctcacagaactcaggagagcactatacgtagaattacagttttattatacagggtacaactcaggaaccgccaaatggaagacatgaataggacaaggcatgggggtgggtgagcacagctctttcatgccgtctctggacaagcctcctccctgcacgtggatatattcactatcctggaagctcccccaagcctcatcattctgagtttttttattgaggtttcattacataggcatgatggatgaaatcactttctattggtgactgaactcatctccagcccctttccccttcttggaggttgggggatggagctgaaagttctaaccctctaaccacctagttgggttttctggtgaccagcccccgcatctgaggctctttaggcccctctccccatgagtcattcattagcacacaaaagacactcctgtccctctgaaaattccaaggggtaagctaaattgtctccccttgttcctcactcctgtagaactgtattatttttcatcgtggtattcatcacaatttgaagaatatattcatatgtttacttgcttaatatctgggtcggtagcccaagcttcaggggagcagtgcactgtctctcgttcactcctatacacacacagcttcagcatctagtacataatctagtaagatatttgtgggaagtaaacttagactcttcagggtaagtgcagagtgaggaggaaccataggcaccaacctctcagggaaaaaagcttgtgtcaatggcttgcttttaagggatgtaggggctgtattgtagctccagtagacatccttaaattcttggagcatgtgtatggaataagatggccctgctgccaagtacgtacagcctggtgaggaccggccacttctactggacattcagtccctgggcgaccgaatgacactatcagaataagtcgaggaagtacttttcaggcccatggcctcttgtgtagtaaacaaggacagatggcattttcatcacttctcccttgtgggggttgaacttctggaaaagaatccggaactttggtttttctagacgatgtttactaactagcgatgataaacttttagctaagaatagagttactttcatggcatggggaagaaaatattttcccaggacaagttaaccatgtctaaaagaatttatttagcttttttttttttttttttttttttttttttttttttttttttttttttgggatagggtctctgttgcccaggctggaacacagtggtgcagtcatagcccactgcagcctcaaactcctgagctggtctcaagcagtcctcctcacctcagtctcccaagtagagctgggactgcaggcatgcaccatcatgcccagctaatattttcttttttgtagagttgggttctcactatattgcccaggctggtcttaaacttctggcctcaagcagtcctcccatctcagcctcccaaggtgctgggattaccagcgtgagccactgctcccagcctggtccaaaagaatttaaaatggagcctataaggaaaaggggaaaggtatccagataatcctaagcactctgaagaatggctcatataatatatggaaaaaagaacaaaagtcggggggaaattcgatgattcaaatgagaaaatcaatgtaaagtgagttagaaaaaatatttccagactccgggcacagaaaagtaaactctaggtcctgacacagtctgttgagactgtgtcctaatgagatgcttttccagcctcaggaaggagcctccttaaagagggaaataagagactctcctctgcttgcttttctgtagcttcttgtagctggagcagcaagtagaagggactggggaactggtgttgtcaacagatcttcactgaatacagaagggccctctcaccttccctgaggcatagagggaagcaggcacagactgtattacgggtggacccaagagaggtttctgagtgacaccagggtcctcgcctctcagcagcagcggcaggctcttgaccaacttagaagctgttgccgttggcttcatgctcttccttgtggatttgctgcctccttatgtttatctattagaataaaaataacaaaaatcaggattatgcgtggaagccaagaaagactgagaaggttattctcagacctctttactggttcttcctgttctcctcaacttctcattgttagggtggccccaggacattctcatctatctgtattcactctcttggtgaatgtggccaggtttattgcttgaaataccatatatatccttatgccttccaaatgccatgcccagcccagacctggcagccagcctccaggttagaatatctgcccaggacatctcccctgggctgtccggtagatatctcagggttctgcatgtctaaaatggatctactgatatgtccagattccaaagtgcttttcacacctctgcttccacagctctggtttgagccaccatcatctcacctagactgctggtctccctgataatgccattgcacctctaatggttttctcagcaaacgttaaatcacaacactctgtttaaaaacctgcactggctctttcccaatgccctcataatgcttgcagtgccccacatgatctgcccttcaccctcacccttctctctgcctttgtctctggccttacacaccccactccaaacatgctggcctcctgaggctccccaagccatcccaggcacggccttgcctcgggctttgcactgactgctcctttttccagatgcacttttgcaggcgtccatgagccacctcccataccttctccaagtctttgttcaaatgtcaccttctgagaaagaaaggcccacacactctgaccatcctgctgtggagtgccactggtactcctgaaccccttgctcttagcatctttttatttctgtagcacttacctaccttttggcatgctctgtaatttgcttatttacttactgtttgtctccacctgctggaatgtaaattccatgggacagtaatctttgctctgtttatcagtgttttccatgagcctagaacaggacctgacccaattaaagtattgattaaaaagacaatgtaggccagtcacgtgaggcctgtaatctttgccaaggcaggcagatcacttgaggttaggagtttgagaccagactggccaacgtggtgaaacctcgtctccactaaaaatacaaaaattagctgggtgtgatggcgcacacctgtagtccaagctactcaggaggctaaaagaggagaatagaatcgcttgaacctgggaggcagaggttgcagtgagctgagatcgtgccactgcactccagcctgggtgacagagcgagactgtgtctcaaaaaaaagacaatgtagactgtcagaagagttggcagtgtcctgatagcagagaggcccagagatgaaggctttccaccaagtgacgatcctgggggggttggaaggcaatcctattgaattgcctgttgtcagggcacccattggaggagtctgcacccttgtaccccttagggaggaggcagtgagccttgagataagggcagttcagtcatcctagcatcttagagtccctctctccagccagcccaggagggctgtgttggtgtcagcagttgggtgcactgaggtgccattcatgaagctgaccccatcctacaaacgcagagctcagccagcaagagagtaccttgatgacactggcagagagccttatgtctacatgtagcactctggaaaaataccctgtagctagccccttttacaagttaatgagtaaaaatgcagttatagcagttatctatttttttacttgttaagcttattcttccttttaaccgcaagtcagctgttctctttgccatcactgtagcttttcaaatcattccacacctggtttatacatgagagagcattgaaatcctctgcaactattaaggccactgggagttattttctcttaatatttttaagaaagttgttggcttgggtttgatcatttcaaatgtgttttattttacttaaaaatatgtatttgtaaaaatattgaatatacactaataattacacacatttcttctgtttgcctcttccttatgaaaagttgattgttactttaataattaactttttcaccttcttagattttaccagtaaatatctgctaacttgaataaacagcatgactaatatttgttataattatcttagaattatttttcttatttgggataagccactgtgggccattctgatgaaggccaagtggaaggtcagggctctctctgaataccacatgggaacgatacagtctagaggcctggttaggaagcctggcttaccgaagttgtctcactcattacctcctgagccggcacattgttgtgacaaagcatcagaagggagcccggaggtggcatgtgggagctgttttcactgcctggcctgaggtgtgggcaacggtgggagctgattctgggggctgggataataactcagtactttcctttctcacagttgtttcctctctttgctcctggtggctgctgtggtttggaagatcaaacaaagttgttgggcctccagacgtagagaggtaagcttcagtgggtaaagattaaagaatccctggaagagctttttttccttctttttctcttaagcaagtgggttttagctatttagtgataatggacagacagacatctccacggaaggaataatgcagccctttctgcagtccatggttctgcagcatatggtcagtagacttagatgagtgctacataaagtgtaattagttctgcaccacagtgtcttaccttccgaaaaggaaactctggtattgacttggaaatgccagttttatccttcagaccagaacccaagtcctgactgaggccagagatccaagggcgtattagcacagccaccgcgtgattaggcaccgccttcatgagaacttgtcatgcgagagggaaatcagccatttaagcatctcaaaaatttttcattattcaaggaaagataaatgtgtgtgtagttaagtttttaacttgagttttatttttaaataagtcttgatttgtttccagagcttcattccaaaagtaataagcaaatatttacagctgacaaatttaaataaataaacttggttgcaaattacaacatatcaaatgcccatcaatcaatgagtggataaagaaaatgtggggtgtgtatgtgcgtgtgtatgtatatatatatatttatatacatttgcagcaacctggatggaattggagaccgttattctaagtgaaataattcaggaatggaaaaccacacttcatatattctcacttacaagtgggaactaagccctgaggatgcaaaggcataagaatgatacagtggattttgaggactcgggggaaagagtgggagggggatgagggataaaatactatacatcgggtacagtgtacactgctcgggtgataggtgcaccagaatctcagaaatcaccatgaaagaacttattcatgtaaccaaacaccacctgttcccccaaaaacctattgaaataataaataaataaataaataaataaataaatattttaaaaataaccaccattaaaataattacaacataaaaactttgtgtattgcaactttcacttgcatcattactttgcctttcatttagtcatgcctgtggcattgttggcattgttgctaatggaaatgctcacgtgtatataagatctagacaaagaagctgtctggggtttttttggatctactcatgcctttttctatataaaaatgtatttatagataagatttagaacagaagggaagtatgtaaaatcacaactcacaagcactcagcactgttgataggatattcatgtctgaatagggttaagacaggctccaggatatgggcctcttgttgtgggccacagtaccaccttttctgacccacataaagatgatgttatcatagagggaatgttgcacactctttattattattttttaaataagtggataacatattcaaagggttttttagataactgtattactgatatactttaaaagcctaatgaattacgtgatgttctgaaaaaaattatattttcaatttaatttaaatgtatatttattcacaatggagtaagaaagaagtaagaagccacagtaaaccagttatcaagaaaggagttgaaaacttttgagtgctactctctccaagaaggacattagacccagggagtttcaaggttgagatgagcttatggagattatgatagcctgttcctccctgagtgcttatgagaattaattgtttctaaaatctgtaaagcaaaggaacagatggaaagcttgaaagagtccgaattgattttatacacagaaatcttggtaccaaaacctgacaaaggtagcaccaaaatacaaagggcagctgcatagtgaatgtatgtgcagcagtctaattgcagtgtaatgaaagagtcacttaataccagaaaacctattagaatatatcatgtcaaaaaaagaatatatcatgtcaatggggaaaaaataacacctgaattcttcctagtggcccagaaatcatttcgtcatttattgaaactcaatatccattcctaatttgaaaacaaaactcacagtaaaatcaaaaatacctttttaacgctatgaagaatatctggataaccagcatcactcatgataaaacaaacaaacaccagaggttgtatccaggctagttagttttaacaagagctgacatctgagcatttaaaaattccaggcactgagttctaagtggttttacgtagattaactaatccttatctcaaacctatgaaataggtattgtccctcgttatgttttatggatgaggggactgaggctcagaaaggtgaagtgacttacaccacatagttaactaagaggcagacgaggctttaactagggacttctgtcttcacagcccaagttcgttatcttcgtgtaatcctacagtcattcagctttgtgctagatgttctagactgtgcactaagtgaaagggcactaagaagtgttgttactattggaaaggaaacaaaattattattttcatataaagttattaaaacaatgtagtagagatttgcctgcataaaaatgaaggcttaagtatatcaaaaaataaatgaataacacagaagctaaacaatcaactggaaattgtttgcagtgtgcatgagagaaagtaagatgcacagcctacaggaaaaagattaaaatatatatatgtgtttagtatggagttggtcatctaataaactatgcttttacccgtgtgatttggaatttctctgtaactgtgaagctgaccattcagaatatatttcatcatttttaaaatgtcagccattatttattccctctcagaattgtagaagcaatgatttgatgttatttttaaaaacaatagtagtagcggctgacgctgtttagtccttgctacacaccagccccggttttaagtgcttttacacatgttgcctcctgaaccctgtcttattgtgaccccagcacttaagcacagaccccaaggagcattgctgcatatattagtcgagtaaatggacctacagctttaaaaaatgtaagaatgttggtattttaagaaaatatttataaaaatgcccttctagaacagagccatatctatccaggccaagattctgtcttctacagtagttccaaggaggcagtttgaagtaaggcctacttgtatcccaaggcataacctcaaagcttcagcatcatgcccagaaagatctctaatatccttaatgatatgtgaacggccgttcaccatgtgctaggcgctgtgctgtagtatctcatttgatcccagtgacaaccttatgggctaggaacacatttcagagggaggacacggatgcccagagacttcaaacacctttcttaaggtcacacagctgtagactattggagcaggagttcacatcaagcctccctaaatcccgagcccctgtttgtccctctactctgcaaaatttcacatttgtttgtttttagcttataccacctctctgaaggaagggttctttcagttcctatctgccgtataatgaggcataggtttttgttgtcctgtgaatccttggtgccagtttcagtaggaagaaagcaagcctgactttagtagtagaaatacgaggagatagagccacaccattttatgtatttgacaagtcgacgtcatagcattaaatccacagtacttttatttttatctttattttcttattttactttaagttctgggatacatgtacagaacatgtagatttgttacataggtatacatgtgccgtggtggtttgccgcacctatcagcctgttatctaggttttaagccctgcatgcatttggtatttgtcctaatgctctccctccccttgctccccacccctgacaggccccagtgtgtgatgttcccttccctgtgtccatgtgttctcatggttcaactcccacttaagagtgaggacatggagtatttggttttctgttcctgtgttggtttgctgagactgatggcttccagcttcatccgtgtccctgcaaaggatatgaactcatttattttatggccgcatagtattccatggtgtatatgtgccatgttttctttatccagtctatcattgatgggcatttgggttggttctaagtcttcgctactgtaaatagtgctgcaataaacatcgtacgttaatatgtatctctgacaggggcttttaaaaaatataaggacaatggtgttatcacatccaacaaaatttagtaatccctaatgttatctaatatcaagtctaaaaagtatcattttggacttgatttgtttgaatcagggaggatgaggtgtttttaacatgtagcattaactaataaaaccccttcagtactcattccattaatggctttgccatattatttatcagcaacttcttcgagagatgcaacagatggccagccgtccctttgcctctgtaaatgtcgccttggaaacagatgaggagcctcctgatcttattggggggagtataaaggtgagaatgtgactcagaagtccctataacttgactttttaaaacttaggctcctaagtctgggaaaccagagagagcaaaagccctattccattacctcctttttttcctctctttctttttaacaataagctaaaacctgaagttgctgggtactcttttgcttttgtttttcaatctttgtttcatgtcgctgagcagtcttgtgttcaggggattttaaaatctaaatgatttgtctgcttttcttttaagtattctgtggcatacaaaacttttatttgaaaagagctacattgaacatcgaatcattgtttttttgtttgtttgtttgtttgagacagagtcttactgtgtcacacaggctggagcgcagtggcatgatctcggctcactgcaatctacctcccgggttcaagcgattctcttgccccagcctcctgagttgctgggattaccgatgtgcgcaaccacgcccagctgatttttgtatttttagtggagatggggtttcaccatgttggccaggctggtctcgaactcctgacttcaagcaatccacccacctcggcctcccaaagtgctgggattacaggtgtgaaccaccgcacccagcctatttttctttatattttggggaattttttaagcagcaaaatgataatacactgtgtattaatactctgtggaaaatatttatcacccccctccccaaaatgatgaagaaaatggtaagactttctccttgggcaaaatgatggaatatttaagatacgctggagaaatagctatgtatcttgaataaaacatacttatttaaaatgttactgagctcacaggaagtaggtaaaatctccagggaatactctccttccctaccctaaaaagaacaaaccataaaccaaaaccagaaccatgatttgtcctaagtggttccagatggtaaacacaacacccacctgaatagatggaaatcctctctatagaaaaacatcttcaattcagcgctgttgaagtcccacagatcaagatgaagtaattaaagatcaccagggacaagaggcaagccgccataaataagagtagcagaaacaacagatgattgatgtggacaggactccaaatgttagaattgaaatctaaagaatataatataactgtgtatgaaatgtttaaagaaataaaagatgaaatcataaagatgagagtcaagtatggccaagcagatctgaagaagaaccaaatggaacttctagaaatgaaaaatatacttgttgaaattttttaaataaataaactcaatttacatgttaaatagcatatcagacataagagaatttacgaagtggaagatgaatctgaaaaaagtacgcagaatgcagctcagagagacaaggagatagaaagtacaatagatactaagaatatggaggatagaatgagaagatccaactcatatatatttccagaatcccagaacaaaggagaggcaatattcagaaatgatagctttccagaactgatggaaaacatgaatatacagattccagaagcaaaacatattgtaagcatgattaaagaaagaaagggaaggcaggaaggaaagaaaacaagttggatttctcataatgaaattgtataactccaaagacaaagagaacatcttaaaatcagccagagaaaaagtatcacatacaacatggagaaactgaacgttagtgcactgttgatggaagtataaagtgatggagccactgtggaaaacagtaccactattccccccagaattaaaagtagaattatatatgatctggcaatctgggtttatacatagaagaactgaaagcagagtctcaaagacatatttgaacatcagtgttcttggcagcattattcacagtagccaaaaagtggaagcaggcccaagtgtccatggatggataaatggataagcacaacgtggtctatgcatccaatggaatgttatccagccttccaaaggaagcaaattctgacccatgctacaatgtgatgaaccttgaagacatactaagtgaaatactccagtaacaaaaaaataaacattgtatgattacacttttaagagatacacttgtggtagtcaagctcataaagacaggaagtagaacagtggttcacaggggctgggagaaggggaaaatggggagttagtgtttaatgggtacgaagtttgagttttacaagatgaaaagagttctggagatggatagtaatgatggttgcacaacaatgtgaatatacttaataccactgaactgtacatttttaaatggtcaagatggtaaatgttatgtgtattttatcacaatttttgttaaaaatgggaaaagaggccgggtgtggtggctaacacctgtaatccgagcactttgggaggccgaggcgggcggatcacttgaggtcaggagttcaagaccagcctggccaacatggtgaaaccccatctctactaaaaatacagaaattagccaggcatgatggcacacatctgtaatcccagctacttgggaggctgaggcatgagaatcatttgaacctagaaggcagagttcacagtgagctgagattgcaccactgtactccagcctgggcgacagaacaagactctgtcgcaaaaaaaaaaaaaaaaaaaaaaaaagggaaaagatcacctgcaaaggaatgacaagctgaccgctaacttctcagaagtcagaagagagtgagagaatgtctttgaagtactgaaagaaacctccccacctagaatagtgtgcccagtaagcaccttccgagaacaaggatgaaataaagatatcttcaaattagaataaaaattgagaatttgccaccagcagacctgcacaaaagaaatgtctgaaggatgtgctaaaatgaaggaaaattacccccaggaggatagactaaagtgtaagaaagaatagtgagtaaataaaagtataatcatatatagaaatctaaacaaacattatcctggtaaaataatatttgtgggttaaaaaatagacaagcctaaagtattgaacaacatgatatatgtcagcagcatatgacacagttagttgctccttaaaacattttcttgattttcttccaggacaccacacacttgccttctagctgttcttgctcagtggtctttgctcaatcctcttcatcttttgacagtggtgtgcgtcaggccctgcctttgtccccttcttgtgtcttttacacccacttcttcagtgatcttcactatcacaggtttaagtaccatgatcctctcacctggactgctcccatgagcctccaacacaaacatcagttgcctactcagtgtccccacttggatatcttaacatggccatggccaaactgagctttggatgtttatttctcagacttgctcctctgacataccttccgcctttcagcacataacacctccatcaccctagttgctcaggccaaaatcgtggaattgttcttgactcattcttgatgtcatgttctcattggacagccagtctatcagcaaatcttgactccgtattcaaaaatgtttcccagccactgtgtcccatctctgccactattcccacttgatctaggccaccgctgtctctcacctggattcttgcagttacttcataactgatctccctgcctctgccattcacccatctagtcagttccttgtgccacagcagagtggtactggaaattattttcttcagccaaactgaagaaactgatgacatttgtgggtatagtcagcagaattctaaaggtggccctcaagatttccatcccacgtttattcagtcacacactactctaggtactgctagagggattttgcagatgtaatgaaacaagggagttgactttaagatacagaaagtttctctggctggtggcagaaagaggaagccagagagattggaaacatgagaaggacttgacacaccatccctggtttagagatggagtggccacagaagtttttttgtttttgtgagacagagtctggctgtgtcacccacactggagtgcagtggcatgatcatggctcactgtagcctcaaactcttgggctcaagggatcctccctcctgggtctcccaaagtgctgggattacaggtgtgagccactgcgtaagccctgaatgcatttcaaagcagagtcttccccagagtctccaactaagagtcccatccagctgacaacttgacttcagcctgagagacctcaggagatagctgataattccccagaactcatggaagacatgaacagacctgtctctctcggcagagaaccctacagagcttgctgggacttctgacctctaaagctgtgagataataagtgggtgttgttttaagcaactaagtttgcagtagtttgttacactaatataagctgggtgcggtaggtcacacctttaatcccagcactttgggaggctgaggtgggaggatcgcttgagcccaggagttcaagacctgcctggacaacatagtgagaccccatttctattctttaaaaaaaaaaaggaaaggaaagaaaaagagaagaaactaatataggggacaaatctcatctaaaggctgcaacagaagatgaaaacatattttccagagccaaatgcatccagagagtagacaaagaatctacttggtcagccaacccagcttttacaagcttttacatccagcaggcttgtctacttagtgtctaaaggacagacaaaatagaatgttttttaagtctccatgatatctgcatctgtgtttgagccaggtatgcagaactatctgacaaatctaccaagcactcaccactgccattcctgtgacctacagttatgaattagaatttcaaatcgagccaaagtacagcatccagaagaaacccacttggcgtggccccttccctacagttcaagcagccctctggaaggggactgcgagacctcagtggaaggtagcaagcagtaccacccgtgtcactggtgctcagagagtactgttagctctctcctgccctttttcattatcttaaaaactgcaatgtaccttttttatatacctgaaattgatggttcttataagcacaaatgaccgttaagttgtccgtatacattaaagcttgagtatcacttaaggtaattttgttttcttctgccagactgttcccaaacccattgcactggagccgtgttttggcaacaaagccgctgtcctctctgtgtttgtgaggctccctcgaggcctgggtggcatccctcctcctgggcagtcaggtgagtagatgcggtccagcgaaagacaccttctaagcatgtgagggagctaagcatgggatacttccctttcctagagaacaaggttataaaggtgataaccaacagtgcctgcccatgccatggcaaggattcagtgagataacccattttcacctatatgcccaaaactgttttcccgaggtcatcgtcccttcctggggggacgtcccgggacctcctcaccgttctggcctccccagcctctcagtgctcgtggatgcctctgaccacaccttcctttgctgtcggagtttctggtccccctttgcctctgctgctctttccctgtctcttttgccctgtcctgcccctgaatctgggtgtgctcccttcaccctgcatgttcttcctcagttgccttctccactccacaacttccagccatctcccctgggctggtgtttcttcaattggtatttctagccctcctgcatttcttttgctttttcactgttttaaatataaggcacaaacacaacgataacataaaggaaacgtctgaaaatccacgcacagttctgctatcccacaacccaccaattttcattgttctgtgttctttccagccctggccagcaatttagttgaaatgattgtatagatctaatttttattctgcttttttcatataactatcttaaacatttttatagcctactacataatattttaccaatgcatgtgacacttctccatcaaatatatgaatcatgattatataaacttctattttgaagacagaaaatatggaatacagttttgaaagtatctcgcttaattacagagtgctttggaggatgcctcaatgtgatcattttagacaactttcagttgagatgattctggagtcagggttaccttagccagagagcaccctgtgtctggtggaaaggctgccccaggatactggtccaggccctgagctccactgtcccttcagtgcaccctcagacccagaagatcctccagcccagctttagaatggttaggatctatagtatcttcacgagggaggcctttcgacatggctcggccaggattcattgtcttcatctcacctagggattcctgtgagttgagcccctaactcggccttgcctgtgttgaggacaggacaactctctcgtctgtcactcaagtgcagtttgtgtctcctgccaccgcccagcccagcaaacagtggctggtgtgccctgagggcagggtggcggctggggcggcaaggtgacaggtgtgcagccctgtagcctttcctgctccagcctttgcctgacatgccccaaccacctgaaacacctaataaaggtctgctcaatgcttgagacccacccaacagtggggccgtccttgctgccccttctgtaccccctgttttaagtggtgcccttttctaggctcccagagcattccccactgtgtgccaggcacttacagctgtctacccccacccccactccccttcacaggctcaacaaggcaagtaacacgctccactaacacaactcctggcaggtctcagcagagctccgagcctgcgctggccatttcccacgtatattaggaatccagctcccccagaaccgtgccttccctaatggatgtcagattactccgttatcaatacaggaaggaaaatgggattgcaagtccccaaagcaaagtgggcggcggggcagtgatgagcataaagggtagttgctattgatcgtgggttgctgcgcgccagatactaagactttatgcatgccaggtactaagactttgtcagttcactcattgattcttcacactagccctgtactactattatccccattttacaaatgaggaaactgaggtgcagggaggttaaagaaccttgcttattccaaagcctggccccagagcctgccctgcctgtatcgtggtatggaatggaagtgactaatgctgactgagtgataggggtgaatctgaatctcgtcataaagcgtgctgctgtttctcggctccttttggaggaaggcaggagaaattgggcacttagcacacgtctacaatctcatttatatgttcccaccaccaagcagagcactgtgcttggttgatgtgctgaaaagcaaactgcaccttttgtgtaaaaagtagggaaaggagaagaatgtgtatttgtatttgcataagtataccctcaaagaatacataaaaattagtgaaagcgtttacccagatggaggggaaggcggagggagggtcagggtggaaggaagacttttccctgtgtatgtgtacctttttgggggttttttgttctggttttttggtttgtttgttttgcaccatgggattgaaaaataaatgtttaaattattttttaaaacaaaataaaagccagctgctcccagcatatgttctctctgtggttctcccaaggtcttgctgtggccagcgccctggtggacatttctcagcagatgccgatagtgtacaaggagaagtcaggagccgtgagaaaccggaagcagcagccccctgcacagcctgggacctgcatctgatgctggggccagggactctcccacgcacgagctagtgagtggcacaccagagccatctgcagggaagggcgtggcggggaaatggctgtgcggtgcgggacggaagactggaaaccctcaaagcatctgactcacctgcatgatcacaagctttctttgacggtttctcccatccgtgttccagcatctaaccttttacttttgcataggaaatacttgatttaattacaggtccagggatgagctgatggttgctggaggaggccagtgtagagccagtgagagaactaggaatgacactcaggttcactgtggaaaactgttcttgggactgtctcaactgtgcaaaaaacaaaagatggagtgtttacaagtagacattcgtcatcagttgttcttgaacatggtcttttaaaaactagtcagatgaattgttttcatctgaagcctgctatcttttttaaaagatgtgctatttattcttgcacgatttaggcaattatctctcttccagggagtacctttttttctagttgagaattaataatggtccatctcttttgatcatatcaagctaggatagaaggggggctattttaaatgtcaaggtcagcagtgttactttgaatgtaaactggtataataggtagttttctatagtaacttgattaatttagtcttaatccatttgaaactctctcttcctttctctctgcctgtccctctccttctccatctcaccctccctctctcacacatacacacacaaacacatacacacaacactaagtgcctagactttaaatagatctagcaattggaaagttagtaagcctaagtttttacataattgcattcctacattcttgtaaaatttaaatagctaccattggcaatctgctttttttctaaaatctgatttgcagccaggaaagaattttctcacccaaggaacatttgatctagcagcagggatgagaggaaagcagaaatgaatgaactgtgaaagctcctgtttttattatcaaaaaggacactgtcaagaaggcgccccctgcccccacccccgtgtcaccctaggcctgataagcgatcagaggaaaggactcattcatgtcacgcttccttgagcagaaaagagcactgagagcacttgggacccctggatcagagagcatctgtgtgtcctgcagcctcctctgaacttgtggttcattctcaggctggggtggactcagatgccaggaaagggacagcctcccattgtcaggcagaagctgcccaaagcctggagaaggacttgtttgccctctttcccccaggaggggctcgacccacccaccctccctctcagaccaaggtggtggctgtgaggagggcagcaaatgctgacaaggatgaaaagcacatggaaaaaaatggatgaggagggaaaactctgccaaatggaaaatgaccaaatttaagagggtgggacagtcccctgctcctctcccagagggcactgcttggaaattgtgttttccccatttatggtgctctgtattctggcattatgcagcagcctcccagaagctctcttctgcttcaaaacctgggatctctggcattaccctattgggatggaccgctggacagcaatgctcgagtttgtgaatttggagagatactcaaaagagctaaaactgcagcattttacctttaaatgcagtgcctagagagagagtattgtctcttccccaacactaaccccactcccatgaagaattgcctggaaagatgttttcaaggaatttgaaccataaaacactatctgatgcacagaacacctctactttgagactcacctctcataaagcttctttttcacattactgttaaagaccagacgttctagaaaagacccctcctctcatgagctcccccatccctgctacagaacacagcacccatggcgcctgcagtggactggccccttaattcccacaggcccccccagcaaggccaaagggaggcccctgggtattgtcctcctacaaggaagatcctctttgtttgttcaaaggaccagttttcctaggccaaagaagtctcttccccatgttagtcctatgccttgaaatatcatgcaccatgacccacagccatctggttatgtcttatttttttcctaaaagataatgtttatttttaaaaaggaaggaaggagcaagtgaagtttcattctgctccagcggtggggaagccgctgaatccacctgcttctcctttgcaaccgacagcaaacagctttctccggcctcagggcagaaaaagggaatggcagggagtaagaggcgctgggctcggagcctgtttccaagaaggaattggttgtcatctggcagtgttgcgcgtcacaagagagcctgtatataaattaaaatagtcaagacaacactgaccttgcacttgtacataactatacagtagtgtccagaatgttcagacattcggagtgtacataaaacagaaaaaatcttcatgtatttttattaaatataacaatgtctgagtttcacctaagatgtttttgtgccatatgctggatatccaggttctcgccaggccccgatacatgaataacaaacccaagaaacgcatccccattgtgtgatgtgttcagatgcatctggcaccaattaggtatttcttaaaacaggactcatctgtcagagtgcacatgaaaaatcaggcagggaatcgaaacgacagtgctggaggagactcaggaagcagaggcgtccctgccgctgcccttggccctgcaagcacatcatgaccctttctggcagcctcttggtgctctgggtagtgagggatgaccagtcttgtcctgagaaatgtttctcttagtctttaagttcaaagactaacctgtagcaatcagactttccaaaagggggttctccattttttgtagttttgtctaaatttttaatgaccatttcctggaatcagtttattatactgaaaactgggggtgggagtagggagctagtttgttgataaatagttcccatttccccatggagaatttgacataccctggactcctgtgtgcctcctgccatccctgcacacagcctggggagaagcctgtgcctccccgtgtggagagaaggcaaccccagatcccctgagctaacccggaggaaaggcagtcctggacagaagactgtcagcagaaggaaagtactggactacccgtgggtaagtcctgccattcaagactggagacacctgggaaataaaaagagcagggcactgctggtgggaagaggcattttaccttccagtgcaaatcctgctcctttgatttaatggggtgtactggggccaggggctgattcacttccttgggagatggtggtgttttcatgaacatctttgatccttccatttcatttattcatccatccattcaacaagtatttgctaaacactaacttaagctaatgctagggtagtgactgagatgtaaaaatagattttagaattaaaacaaaatccaagtcctcacacccctgtcatcccaggagatctttccttgtggtggtttctgtgagaattggccatcctgaggacacagccaggacggcagaggcctcctggcctcagggcatgccctgcctaccttctgaaatgtttaccccattgaccaaacttggctccagccattgcggtggtttctagatagccaggcccaccaagagatattgccccttgatgagagtcaaacaccctgcctacaaggagatgttttgaaatggagaggaaaattggcacctcatcttttaaaggcagtaatggaattgattttcagtaactgaatttgtgcacaaaacattctaaacactagtgaagcctgtttcgttgaactaattctggctctggaaatgtttttgttttatagttatttacgatttcgtttgtttggattcaagcttagtttgttaatatgtataatttagcatctattacactcatgtaaatatggagtaagtattgtaaactatttcatcgcggggattgtgggtgttatacatacatttaggactgcaattttttggtattttttgtattgtaaaataacagctaatttaagcaggaacaagagaactaagggaggtctgtgcattttaaacacaaatgtgaagaacttgtatataaacaaaagtaaatactataatacaaacttccttctgaaataaaagtagatctggtaaaaatgtggcttttgttctgagtgtttcattttgattttgcattgttttgcctatatttacattttggtcattagaaccttaagggaaaaaaaaaagcgtttaccagttttcagactgcgtcagagggagcacttgacagttaacggaggtgagggtgaaaacccctggcaggtacctcagacagccctccaggcagcttgtgagccacagaccttccacacagcctttgtgtgcctacagggcagctgggcccgtgggggcagggacagatctgagcagtgaggtatggacagccgtctcactgctccactaaccacaccactgtctccagtggtgctgttatccctccactttgcgctctcctcacaggctcctgaatgtcctctaggttgtctccaaactgctaaatctcaggtgtgctgacaggtctcagccgtggccagtgttttcctcggccttgaagttttgaggaagttactcccattggcaaggccttgtttgggggcctcctgtgtgtcctgcccccttttatttggctcctgccctcagaatgggtcagagtcatgtatttcagtgcagagtgcagattcccagtgctagcagttccttccagaaggatgaggtcattgaaagaaggaggaaacacaagacggtcactcctgtaggggaagatggcagggtactagggccagggcctgaggtgagggcaggagcctggaggaggcctgcctaccagagctcaggtctggcttagggagggaaatggctggactagtggctgcaaacaagttgagaaggaccttgaaactcttccagggagggttatgagagccaccaacagtaacaggatagaaaccctgtgatttggtggtactgtggcagagacaatgctgtgtttaccaaacctactgggcccacagctcatcatttcccagcctccctgcagttaggttgggaccaagctaagccatggccaaggaaaggttggaagaagtgatgggcaccaattccaaacgtggcacacaaatgctcccacaggggactctcctacggatcacatgttaaagactggagggactgtgggtccctgagtcaccccttagaggccggccgcctgatcagtaagagctgtgctggcctttgcatcactggaaagcaaactcactctgctgatccactgagatttggggctttgttacactagttagcttttcttattctcactaatatacaaatcagcactttgaagtgcagtgcacatgtaaccaaacccttaagtacatggcactggctcagcgtgtggccaggtggcgagcagtgataagacaggtgcagctggcaggacaactgaggtccctgccaggcggagcaaaacatctggtaaggccgtttcactcgataactcggaaaacaaactccatgtctgctgactttttgacttgaggggaataaacaacaacaacaacaacaaatatgtgttgattgttactggctgcttttggcgaggcatcacgagaaaaagtttacttcaagaaagaattagccagtttacaagcagaagggaaaaagatggaaagatgttaaccagggccttgcaattctggaaaagccaactgcttctagtctccaaccagtaagaggtgcaggtgagcaacaaaggccccatgagacttagttgaacacagtgactgggcctcatggtgaccatccaatgaagggtgtggtcttcccactggagcatggaaactgcaaagccaccagcttgagggaggggcacgtggttaaggaagcaaagaaaaagctgacatgagaactgtttccaggaacaaaccatgaatgtagtcactgaccctggacctgcctggaaataaataaagatgtagtaaatttaagaaaccattagcaaagccttaaaaaaaaaaaaaaaaaaaaaaaaaaacggtggcaattgaggaagtcttaaatccaccttcaggcaggaaaatggttgtgaaagctgtgtccagcgagggctttacaagctcagatgtgggcccaagagcagaactgggcctgagcgaggactccccccagcccaggacagggcccagcaggattgcaaaaacaccgcagagcagcaattgctgcatctgcacccgctccttcctgggtaggagggcctaggagggtgtcctgcctgttctcatcactacctgctgggtgggaggtggattaagctgtcttgttaattcaggattgtggacttcaaagagccacctgagggaggctgcatcacctggaggtctgggcggggtgtgacctcgtattgtccccctaggagagggtgcctgtgacccatgtaggagaggaagcacaaaactggttttggtgatcagaatagcaaactgggccagatgcttaccacacatttcctcttcctgagtccacagcttcgactgcatggcctgggcccgtggcatctacccagatgccttgggaccagccctcaccaatgatgtgtcatttcaaggccattcacagtaacagtgtctcctccactgtctccatcaaccttgaaggcttatggtgaagatggtaatacaacaggattgaaggagactgggtccctgaatgactttgtggaacagagcactataggccaaaggtagtagaattaggtatcttgttttatgctgcttaagtgaattaattaattctctagatttattcacctagttattcaacaaatttttattgagcacatcagggctagggcattgtgtcaggatcagagattttgcaatgaacaaaacagaaaactccatgtcctccaggggagttgataataaaatgtcagataagctctgtgaagaaaggtaaaagtagggttaggggtagaaagtgctggggggattgctacttaacatagtgtggccaggggaagccattctgctaaggtgacagctgagcagaacgatgagtggagggggcaggaaggaatgtggaggtctgggagaagagcattccaaacagggatggcaggtgcagaggccctgagggggcagcatgcctggtaggcctgctggatatttctgagaatgaaaaagtccattcccagttgtttgcgtggagaacctaacccagttataaacacaaagtacttgagagctggtttaatatacagccagctttccagcagtgcaactactgtgtacatcaagggaaaactgaacttcgttttccttaaaacttatcatcagctggtcatcattttgacaaattctgtcaacaacagcagtgtcattcctggcatctgtatgggtcacgtctgaacagacacacgccctgcagccctgcaggtaccagctgtataacaagaactcccttccaccctgtgtcctggaaacaagaaagccatagaccggaagatcccgatggctatctcaaatgtgctggatggagttgccagggcccactggcatgccctgtaagcctttccttccacgtttggttcctgccccttgaagactccatttctgagtttgtgtgtgttttactttctagtgtgtgtcctcatcttaatttttctctctctcttctgccttgaactgaaggttcgcttgggtgtggagagacaggcccccagcagagcagcttcccgagacatcctccgatccagggcttcccagcagcccggcaaggcagggctgtgcctttctgcttcagctcacaagcatgccaggctcactggcaagctgctgtctggttgagagactgctcctaaagccctgcacagcccctgtcctcctggccctctggaaattccaccaacccgtgtccacatttcatgcaaaaatgagctggttctgtgagcatggcccggcctgactcgcttagtgggcggtaagtggtttccacttcaaccttgcacctaatcaccgggctccacaccaggatggacattcatgagccgtgaagtttccagtaataaatccacagatgcttccagcacctgccttttcgcatcacctccactcccagccacctgccaggcaacaggtaacagagacccagtcacaggagggcagtgtgggggcaggactgcagtctcccaaagcccatgcacaaaaccgacagcgccctggcaggacaaggaggctgacattcagatgtggaggaacaacgcatgacccattcctggtcatgggggccacagctggactcagccttgaggcttggccagacttaacaccgtgtataaaccaggacctttttaggtagagtaatggaaaccaaactctaatgatcttagacagtgctattagtctcctggagctgccagaacaaattaccgcaacttcagtgtcttgaaacaagagaaactgattctcacagttctggagaccagaagtctgaaatgcaggtgttgccagggctgtagtctctggagactctaggggaatctgtgcctacctcctccagcttccagtggctcctgacattccttggcttgtggctgcatcaccccaatccctatctctgtcttcccctggtcttttgctcaaaatgtctgtgtttagtttccctgtagacacctctgcatcactctcatgagatgcagaggtgcgacatacaggtgttgagagcccacttagataatccaggataagctcctctcaagatctgtaacttggctgggtgcagtgtctcacgcctgtaatcccagcactttgggaggccaaggcgggaggttcacttgaggtcaggagttggagaacagcctgggcaccatggggagaccctgtctctactaaaaatagccaggcgtggtggcacacacctgtggtcccagctactcaggaggctgaggtaggaggattgcttgagcctgggagtttgaggctgcagtgggctatgactgcaccactgaattccagcttgggtgacagagtgagactgtcaaaaaaaaaaaaaaaaacataaaacataacttaaatcacatctcttgccacagaaagtaatactcttttgcctacatataaggtaatatttacaggatccaggggttaggatgtggacatatctttgggaccactgacagccatgaagcaatctcataattttcaaataggttctgtcctttttatctttccagtcttttggaaagcatatgcctatattttcaatccacaattctatttttatttgaggtcatttcatttctggtttttattttttattgagacagggtctcactctgtcacaggctggaatacactagcacaatcatggctcactgcagccaacttctgggctgaagtgatcctccagcctcagcctcctgagtagctggaactacagacacacatcaccatgcctggctgattcattttttaattttttctagagacaggctctatgttgcccaggctggtctcaaactcctggccccatgcaaacctcccgcttcggcctcccaatgtgctgggattataggagtaagccgccttacccagcctccagttttattgtgttttgttttgttttgtttgagacagagtcacgctctgtcaccaggctggagtgcagtggcacgatctcggctcactgcaacctctgccttgcgggttcaagcgattctcctgcctcagcctcccgagtagctcggattataggcatgcaccaccacgcctggctaaatttttgtatttttagtagagacggggtttcaccatgttggtgaacacaaagtatttgagagctggtttaatatacagccagctttccagaaatgcaactactgtgttcatcaagggaaaactgaacttcgttttccttaaaacttatcaccagctggtcatcattttgacaaattctgtcaacaacagccatgtcattcctggcatctgtattggtcacatctgaacgacacacgccctgcatgcagccctgcaggtactggctgtataacacgcctggcaagaattcccttccaccctgtgtcccggaaacaagaaagtgattgtgatccgctcacctcagcctcccaaagtgctgggattacaggcgtgagccactgcactcggcttcctccagttttttttttttttcaatgcttatattttactctaattaactgagtcaaaaatggagaatagttgaatacactttcatgtaaggcgaatcatttagccgatacttaactctgcatttgggctaccatgccgctgtggttagcggggcaaggtgatgagccctgtctcaacacacacaccccgcctctccccagcccacttacacgtgtccattcccacgcaggtgtgggggccttagaggattccctcttcttcgtaaagtgagaatgggctagactcggcttcactgcccaacaactcctttttttcctttgggaaactgtccttcccattccatataaccttcatgggctgagatcactcaccgagctacaggaagaggcccattactatggccccatcagggttctgcctgggacagtccataaatgctggaagagagaggtgcctttccctactgaggctgctaaaaggagacactgcaaactggggctgctggtggcaatcttacactctcagtgaaagcctgcctggctgcaggggaaaccaatgcacagaccagcaggggcaacatcatttgaacccctggagacagctgtgcctgaagcccacatggctcaggcacatgctcaagccactctgatttgcttgttacagtcaagagagtccttggccgggcacagtggctcatgcctgtaatcccagcactttgggaggccgaggcaggcggatcacctgaggtcaggagttcaagaccagcctgaccaacatggtgaaaccccgtttctactaaaaatacaaaaattagccgggcatggtggcatgtccctgtaatcccagttgttagggaggctgaggtgggagaatcgcttgaacctgggaggtggaggttgcagtgagccaagattgcaccactgcactccaggctagctaacaaagcgaggctctgactcaaaaaaagggagtcctgactgaagctgagaggctggtggacagctgtcagcaagcagtgtttgtgggtctgatgtgagctgcgaagtccacacctgatttcagagctggtggctctttttccaatcaggacagctccaggcctgagttttggtgtggtctgtacctaaccgctgtgtcttaggtcaggatctctagaagccaagcccaagacaggagttctcaaatgccatgatttactgagggaatgcctttgggggaacctgccagtgaggagagctggaggaggcgggcaggggcgggagctgagccaggtgggggtccctgctggagtctagcctcagcttgaccccacaggggctctggagcaggaacagcacactgcattgtcccttgaggcagtcactggctgcagttgcctctgggagcagagtaaaagtggacaggcatttctgggagtacaattccctagagaaggggacagctctgagctgtgttaccagccaccatttccaggggctgggggatgcgctgcactggcccagagaggtctctgagcaaggcccccacaacctccacttcaacctcctgccaaacctcaagcagattgagaaggagccgctagagacacaggaaccctttcctcatcagaagtctccaagctttggaggaagaaggaggcaggcaggaggcgggaggatcgtttcaccccaggggttcagggctgcagtggactatgatcatgccactgcactactgcctggtgacagagtgagaccctgtctcaaaaacaaacagacaaaaaaaatcaatgctcttagcatctgctgggtccacattgggcagtgtgtgtgacgtggtccagctgcaagggaggctgggaaatgcagtttcattatctgagtactagtggagaaagaagagacgaaagcaatgagaatccctgccatgaggaagtgagagctgattcatttcagcttccttaggtgaggtgatggggcccagacaggttctgaggccactggaggtcacacaggccagcagggatacacccagtggtagaccctggtctccaggctcccaggacacagaccacataaaagcaaggtcagtctcagcacacagatttaataagcactgtatgttattcctacagctgcaggaaaccagggggaagatggccacagggccaatgccaggcagggcacagggtggggcccctcaagcagcatatggggaacaggaaagactctgccagcatggtcatggcgcacaggtggctacaatggtgggtaatgcccagttgggaggatgcagtgttagacggggtcttgtccgatggattccttagggggttatatgcttgggaggctgatacaatttcctagaattctgggattctggatggtctctgacctgctctaggggatctgggtctccagagaggtctcagctacaaaagtgaccctctcctgaccccaccttgtgggagaccccagtggtctcaaggtctgtgaataaagggacttacaaccaagatgcctcctgacagggagacgggggctttacagtcaggccccagcctacatcccttgccccaggggacggcacacagggtgtccaaacctacaaagggcagcggagtgaaagcaccagggccggcttggggggtaagccagccccttctcaaggggccagtaggccacagaggcggcccaggcaggcagggtggagtagctggctgtgctatccgaggtcgctgtcctaatcagagcagggccgggagagccaggacaggaagtatggagagcagggagcgtctctccagggccctgcctgtggaggacaccttgggggtgggagccaagtgcagacttgaggcaaaagcctgtctctgccctctgcctgcacccccaccccaggcccttcatgcctccacccaggcccaccagggacggaagggtgtgaaggtgacagtgggggaggtgccagctcaccctcccctccctgcacctacctgcaggaggctgtgctccgggtctccctgggggttcagctggtccagcaggactgggggccacccgctggcaaaggcctgaatggcaccatctatggagggaggggtccagggtggacttagctgggaaaccctagcacagggctcagcacaggggacaaagtgagagaccccctgctgcaaagactggctccttggacagaaggtgtgtggtgaggaataacaaaataataagcacagctgtgacagagtgactcaactgtacagtcttccattctcccctctaaaatggctcccagccaggcggcttgggagggggcagtaagcgccgcccccactccccctccactcccccccgggcccctcacccaagcagcggttcctggtaaagagcccccggaaggcttcgcagtcctcacgccggttcccgctggctccgcagtcgcaccagggcgccacgcgcgcgctcacgttgtccacgtagttaggggtgacggcggtgcctgcggggaccctgagggcgaagtcatcggcccacccgggcggagatatcccctggagaacccccgccctcgcccggatcccggccgcgcgtacccacgaggcccgcgtaggcgcgcaggcagcgggcgccctggtccagcaggcagccgtcgggggcgctgggcgctggggtgcacgagacctgaaaggccaggaggcgaggcctgcgcggcgggagggcggtgagccggagagaggccccgtccccaccctcgccacggccccgccgccgcccgcgcgcacctgcagacccggctgcgctcgcagaagtttaagggctcaaggcaggagggcggcgcggggccgggccccgaaaaggcgcaggagggcacgaaggtctggcgccgacgctcggcgcacgcggggcccgcgcacgggcagaagagcagtgcgtgggtgagcgcgggcggcccgcgggcgaagaagcggcgcagggcccggcggcagcgggcgcggggacagcccccctgcgcagcccggcccaggcactgcgccacatactcggagcgcaaacgctggcaccgcgcgtccgccgtgcaggcttcggccgcgtccacacatcggttccctccgaccgagctcgccgaccctgggaaaggcgcggggaggctgcaggtctcagtgcgccccgcatgcacacttcacccagcccatccacgcccctggaaggtgggggacactgaaaacccgagaaagcatagagtgtggcccaaaggcggggccgactggcactgatcggctctccgtcgtggggatgggcagcggcgggctctggagggctctgcaacacgtcagggatggagagggagcatggaggctgagccaggccttccccaaaagctgaagcccctccttcccaagcatcgccaccatttctccagaacggccacacacgtccaaagacgggtccaggggctcctcctacactcaatggcactacctgacgggggaacaatgaggctttctggggatctggccaatggagactttaaaaccagagatggcatagaagacagtggctgctcctagtctcttaatgacaggctgtgacgccatacctttcctcctctaccccctccacctcgccgcttatcctccaccatggagaccctttgggtgggtctattgatttctgtttctccctccttcctgacctcctgctcctcctcctgccccctgcatgggtgtctcccctctccagcccttcctgatgctcccttgagtcgaggtcatcctgccccatctgcactggcttcctccagcccctccacccttcatcagccaggggagagcggattcatgcaagagctctggccactgaagaacccactgagtcctggctgccagggtgtggattcagagaagtccctgacgacacaccgccgggctttgtcctgagccacaggacccaagggttcatcagtggttttagtgaccaggccccatgataggtgacaccctgctggagacagagaaggtgcctggcaccccagtcacacaccaggggttgggtagacagagggtgagctctgcccacatgcccacaggctgtgtctaaatagagccaggataactggaagttgggacttggcagccccttcccaggatttgagtcacaaaaaccaggctaatcgaatcccccccagcctccacaagttctccagtctggagcatctcattcagactagaagcctttctggtgcccagcctgagtggacgtgcacagcctggcccctcatccatctccctgtgtgtttgtgcacaggggctacggggtggtatcccccccccagggctgggagcagggtgcctctctggcaatggctgtgtctttcaggctgtggattggaccgcgtggtgagagtgattcctgctgtgacttcagcacctgcctctgcaggaaggatgaacatagctcgagggcttagaatggtccctgagtggaggggatagatggcagcggggtgagtcctcccttcctcccctccccaaagggcacactttgctttcctctcacagccttgccaggcacatcctcaggtctcagctgcacacaccagcacctgatgttgcctaagggtttgaacccacctctgcctgttgcttacctgtcacccttgcccagaacacccttacccagtctccaccctcacagcagctcatctcagctgcaagatctcctccaccttaaacctttaccagattccactttccacactacactcggtaaagtgacccctccctccgcgacatccatgcagggacggagcagtccaagaaggtggaacaacagatgaacaacaccgaagattcaccaaggaatctgtgtgatgggtaggagggctggggctgaggggagggtgagagagttgggagatggcagacaataggcaaaagttcctggggcacgggtgccaaggctggactcgggagggggatggcggtggtggcttgacggggctgggaggtgaggtgctcagcacatagtggggtcaattgccaggggtccccaagccgtgcgcacaggcctctcactggcaacccttcctgtggttcagcttttcctggaatatcttgccctcccaccttgtcactgaggagcagggacagagaggccagggttcggggtccaggggaagagaggggcgctcacccagtaacagcagcagcagcagcgcaggccccaggcagcggaccatgctggaccttcaacagagaaggatggctggcagagccctagtctgataggcgcccccttcctagtgcctctggagcaggagcacagtgaaaacccagctgtctgcgctgatacccctgggaggagcctttgctgcagcaactccccgccctcattaagtctccaccccaggctgcaccgtcaggtaaacctgggagccacgggattcggcgcctgaatgtgcctagacggaccccaacacactagccctgccacgcacacccagcaacacacagacaaccacccagggagacctggtctctcccatgctaaactaggaacgctatgaaacagcatttttcttttccttttttatataattctattttaaacttaaaaaaatttttttgaatagagttggggtctcgctctattgcgcaggctggtcttgaactcctgggctcaaaccatcctcccacctcggcctctcaaagtgctaggatgacaggtgtgagccaccatgcctggcctattttaaacttcttattgttgactaattttagacttgcagaaaagttggaaaatgtaagcattttccttacacccttcacccagcttcccctgatggtccatcttacttaatcatagtccaatcattacagctaggaaactaaccttggtacaatcctgttaacgaaactgtagactgttttgcatttctcatttttccactaatgtcctttttctgttccaagatccattctaggatcccacatcacagttgtctccttattctcctcaatctgggagttccttcatctttccttatctttacccttgacacttttgaagaatcctggccagttattttgcagaatgtttctcttgagttgtctgatgttttattctgatcagaatgagacacagcattgttttgactaaccaaaaagttattctataagtaaatattgaggttaaaaatctcatccaacctgggcaacagagtaaggccctgtctcaaataaagtctcaacactaagatttaaaaagtgaccagaaaagcccccactatgatttgtcttgacttttttttaaaaaacaaacaaacaaacaaacaaacaaacaaaaacgatgtcttgctctctctctccctcaggctggagtgcagtggcacgatcttggctcactgcaacctccgcctcccaggttcaagcgattcttctgcctcagcctcccaggtagctgggattacagacgcccgccaccatgcccggctaatttttgtatttttagtagagacaaggtttcaccatgttggccaggctggtctcgaacttctaacctcaagtgacccgcccacctctgcctcccaaagtgctggaattacagacgtgagcaactgcgcttggcctcattagcatcttaaatctccacacaggggtgtgttccttactattataaggagcaaaggatcagtttgaggacaggtaaaataaaaatgcgcttgctgcctagagggagaagtccctgctgaagatagctttgcttgaatgagctcaattgcaatgccagtgctgaggcttgttgactgtacggtcaccacagttgctgctgcgcgcctagaacatggtcactttcttgactacctatcctgtctcagtacatctgtctgtggtttgtggtggtccatttcctaatttttttaatgaatcagaagactgtgatgtgctttccgctgtgctaaccatggccgctgaagcaaaatgtaaaccaagatgcccctgcagtggttgtgcttcactctacgacatctgttaccggaaaggggtccagattcagaccccaggagagggttcttggatctcgtgcaagaaagaatttgagacgagtccataaagtgaaagcacatttattaggaaagtaaaagaataaaagaatggctactccatagagagcgcagccctgagggctgctggttgcccatttttatggttgtttctggatgatctgctaaacaggggtggattgttcatgtctcccctttttagaccatatatggtaacttcctgatactgccatggcatctgtaacctgtcatggcgctggtgggagtgtagcagtggggacgaccagaggtcactctcatcaccatcttggtttgggtgggttttagccagcttctatattgcaagctgatttttttgtttgttttgttttttgagacggagtctcgctccaggctggagtgcagtgacacgatctcagctcactgcaacctccacctcctgggttcaagcgattctcctgcctcagcctcccaagtagctgggattacaggcacacaccaccatgcctggctagtttttgtatttttagtagagatgaggtttcaccttgttggccaggctggtctcgaacttctgacctcaggtgatccgcccacctcagcctcccaaagtgctgggattacaggcgtgagctaccgcgcctggcctactgcaaactattttatcagcaaggtctttatgacctgtatctcctatctcatcctgtgacgcagaatgctgtaactgtctggaaacgcagcccagtaggtctcagccttattttgctcagcccctattcaggatggagttgctctggttcacaggcctctgacacatcctcttgtgttttggcgtgtgggaggaaagaggggtgagggaaggaaactcaaaaccaagctctgaccacacagggcaggtacactctcccacctgtctgtgggtgccacaagtcaagggaggggcagagagagaagaaggtgtgacagatggccgcaggccacagaatgtcagaggaagcccagttcctcccggggcagcccaagtagctggtagttgggtggccaaacagagggcgtcacagctgagctgggctcgctcgctacccccagctcagcgtccactctgcccctcagtacctcctgctcagcctcagggtccatgcctaccctcctgcttcccagtcacttctgcgtgcctcctgcttttctgctgttggccccatgccagctcctttctgctgagcttctcttctccagttctgcagcacagccaggtgatcctgggctccagacaggcctctcccccagtctggggcctcccctcttagagccctctttccttcccacgtggcctccccagggttcgccactgaatggagaaggggtggagggggtgctgggcagtcttggggaatagccaagagggcagagttggcctccccagggtcccttgtagctggagtcccgcggggtctagacaccccctcctgaagggtaagagcgggggaggtatattaacgtgtatttttagagtctctctttttttttttttttttttttgagacggagtcttgctcttgttgcccaggctggagtgcagtggcacgatctcagctcactgcaacctccacctcccatgttcaaacaattctcctgccgcagcctcccgagtagctgggattataggcacgtgccaccacaccgggctaatttttgtatttttagtagagatggggtttcaccacattggccaggctggtctcgaacttctgacctcaaatgatcctcccgccttggcctcccaaagtgctgggattacaggcgtgagccaccatgcctggccttagattctctattttatgatggtttaacatctcggggtgggggcttgttggctggagagaaactgcttgattcctggagatcagaaacaactcatgcctttcatatgcaaaccgaccagtcttgagtccatacaccaaccacccccttcaaggaactctcacatacgaaaccagtatttcccctgccctaaaccagctcagggccaggcacctacccagacaattagagcccaaccccacgccccaaaccccaccagaatgattcaaaatgccaatcctaccctcttcccctggcctgccttgcctccccagtggaaacggcactgtgggctgtggcctgtgccttccactcgctcctgattctgtccctggaccaaacctagtgcctccccactgtggccctgcatggtgggaaactgtgagtaataacttatttcaacagcattggcctctgtgtcatcagtcaccttcataaattaaaattttgcaactacaactgaggcaggagggggctttagagagcactctcacctggccccttgggcttgtggagtggagcccgaggtgaagttgcctccctgcactcagttttgggatggttttgttatgcggcaacagctggctgatataggccactcagcagctcttgcatgaagcaatgggagaatgtgaacgcccaagggaagcaggagtgacagagcaaagagggtgttcaaactaggcaacaccgtcctgtgcccagacacatgcctggggctctggctgccacctaggctcggcctgccagccaccaccccgtcagccaccaccccatcagccaccaccccaccaaccaccaccccgccaaccaccaccccgtgtggtcctcagggcaccccatgggttgaatttacatacagaaaagactaaccaaggtccaagtgtaatatgtctttttaaaatttattttagagacagggtcttgctctgtcacccaggctggagtgcagtggtgccaccatagctcactgcagtgttgaactcaggctcaagtgatcctcctgcttcagcctcctgagcagctaggcctacaggtacacaccaccacgcccagctaattttaaaatttttctgtagatgcggtgtcttgctgtgttgcccaggctggtgtggacctgctggcctctggtgatcctcctaccccggcttcccaaagtgctgggattataggcatgagccaccacgcctatagccaacatgtctttcttttgacttctactttggtatcttttcttaaatggttccctctgtccccccgacacacacagaatgggggagaggctgtcagattctgagctccagaacctcaggtgtagcactgggattgggggtgggggctcaggaaccacctaggggagaagacagggtgggaagaaacaggaaggaaggtccccaaaattatgtttgtttgcagaggccagccaggctccaggggagtgtggactcagtcgaaccatagggccccaggaccactagcttctggccagcagtcatgccctccacagagctgggtccgtggaaattgcatgtaggagacacaccagactcccaggacagagcccttttgggatggccagcactacccagcctccactggtgagggaggtcaggggctgtgtgacctttgcttctgggactgatggtttattgagctggagagtgtgcccagcagtgttctccagccctcaggaacttctaatgtggctctgggttcctggagtgggtgggtcgaagctccactcggggaagaaacttccaagctgcctgcaggtgctggaggtccggtgattcactggctctgcccctgcagttcaagttcctggagtggctgtcagtggccacctgtctttaaatctgttcattttaggagctacctctcaccagaggcaggatcttggcatctggacttgatctgctgagaatgaggaggatatgttgtcccctaaggactggggccccaggctgcaagctgtgtggcagagagcccatcctcactcagtgaggaccagtgatccaggaaaagccacagcttctccctccccagcccaggggcttccagcatcctggtctgcatgataaccaagaggtcataaactcatttccataataacctgagcccagaaacctgattagggggcagcaaactgaggggtgggagaggtgggagggtgggcgatgagagggggaggctttgaatccaggtccctgcctaccttgggggtcaggcgagactgctggcagaggcttctcagggtggctgctgggctcatgagagttctcagggtctgggagaaatggtggagggtaaatgttgtgaatatggtcagcaggagcccctggggctggggaggggcataggggactcaaggtgactgggtgctgcccatctggaaggaggcaggaggcatgagcccttcccttctcccttccctctccacctccccctggtgcctcactcacccaggggccagggctgtccagtggctgtggggcccaactccatggggtgaacgccgcccagggggtggtccctgtgtgggccatctttggggctgagcaacgtgataagagtccaggaggttggcacagtgatcctgagtgggttattgcctccccgcagcatggtgtccagcccagggagttctgcgtttactgagtttcttggggcacccatctgctccaagtcaccctctcagctcccttcctgctccctcttcaggggagccttgggatccaggctccaagtgagcctcatgccctcggctggcacctcctctctctagtcctaacatttcctccaggctctgacagcagcctggcactctccagatgctggcatcgctcagcttccaaagaaccttggatgtccgccccttcggcagctatgtctgctctccttgcccctgggtgccctgctgcccttgatgattccaagccatctttgactgtccccatcccatcccccaaggccttgtcatttcctgtgatgttccttcaaaacattctcccctgccctgagactcccgcctggggatgagaagcagccgccaccctctgcagcgccccctccgtgctgacacgccaggctctggccaccttgctcctctgcccacagaccctcaatcacaactcgctttgtcagggtcctcttagctgccacccggggcccaggtggtgccctgcccctgtctgttatgccctctgcccccatctctggcccaaatcatgccatctcccttggcttgcccggagcactcccaagaccaggctatgtcagacatggccacagagtgcctgccctgcctagggccctggtgcagggtgagtcctaggacagccatgcttagtattatgtgactccccactccgccaccacccaggtcacagagaactgggttaaggcagggccctggcacaggggcagccagcaccgcagctgaccagtggtatggagtgaaaagatgtgctgggcccagcatttgggaacttcaagggggtgacagaggtgatttgtgcagaggaagtggcaaagggccgaaaactggtgagacagaggctggacaggcctccgggggcagcatggtacagggactgcaatctgagccagggaaaaacagggcgaagtcaagggtgaggcagccagctggtgggagaagcaggagagtggacaagaggagctgtactgggaggtagagggccatgccttgcggtgctggtggtggggcagggatccaccccctcgcttgactgggaggccactggaacctcctgttcaaagctacttctttccatggcctctggggctgctctctgcacctgggggcaaggctgagggcctgccccagctcccacagccccagcagagctctgaggaggggaaccgcaggagtaggctcaggaagcaggcgctcggagcctacccactgcacgcagggtcccttctgcagccccagctgcatcgctgcagatgggctcctgggagtcggtagcaacaccaggccaggccggcccctgggagcagaggcagcaggacgctgaggagcatggccagcaggaaggtgtcatggtctgcggggattgggggaaggggcgctgagtcctgagcaggtgcaccaccccagctcctgcccacatgccccccactggcatactttcagcctgcacagggccactgtccatgctgccaccaaagcctggcttgtcacagaagggtggagcccagcctggagcacagtggcagttatggttgctattgcaaacctgcagagaagagaagaggagggtcacgtaggattaggaaccccaaggtcacccccactcctcgggctctcaccccgtggctgtggcaggcagtcaggcagcgctgaagctcctggaaggcattcttcctgcagcgcctgctctggcacacctacgggcagtgcaccaggcagtgagggggacactggcctgcgggattcaaacggcaaggaggggtcgggtgggcagagctcaccattctaggtccacactgggtgcctggctctaccaggcccaggccaagcaggtccagctgggcactggggagtgccaaggctccccgacaagtcacttcctggccatctaggtgaacggtagagtccactggcaccatgtgcggtgcgagcaggctgggctttccaccctggcactgcagcttcccacacagggcatccctggggaggaagtagaggggggtcaacagctgcagtaccccccttccccaaacccactccatagcttctgctccctccactcagctccactccctacctccctgcacagggcaggaagtggccctcgctgtcctggccgcagtttccatgagcatctcccgcagagttcaccacctggaaacaggcctcgggagctgggtgggagcctgaggaagcatgggccaggctgggggcagctcggagaggggctgcgctcagcgggcctcagtttcccctgcccatcttccccacagtagaaaactggccccaccagaggatggggggcagggtgcaagggtgctcgtgtcctctcaccaggcccccagagctgctggcactgctgctccagcgtgggacatgcgccatcccagcagtagccactgcccctggcacagggtgagccgtccagtaggtaaacgtctgggggacagtgggaggaggtgcccgtgcaaaactcagggaggtcacagtcacccatggcctggcggcacagcgctccagccggcttcagctgcgcaggtgacgggtggtggggaaggcagagagaggccacgtgcagtgagaggtccatgccgagagcgcggctcggagctgggggagccaggcctacccaagcccagcacccaacgggggaacctgagggcaccaattaactaaggccaacaggccggctcccaagctccccgaaaccctcaccctgaaccttccatgccctcaccaggcagcgcacgcagcagtccccgtgggcgcactgggcccccgggcgcagcgagcagttgtgagcaaagcagcagaggtcgcggcactcctgggaccagaaaggcaagaagggcccaggtgagggcgcagcgccccagacctgagcggagagggcaagtgggggccgggcgagccgacttaacctggccagggccgcagtcacactcctcgcccgcttccacgaagccgttcccgcagagcgccggcggcaccgggagtccggggtccggggcattggagaggcaagcgccgccccccttgcggaagaaggcgcgcagctggcggcggctgcaggcgctgaacacgcgcggaaacgggtgcctaccggcacggggagggcattgggcatggagggacagtcccccaacccccgcgcttctctgatccccacccctgggcttggctacagccgccagacgcgcagagcccagagaggggaagtaacccgcgcaaagtcacacaacaagcgggacaggggacgatgcggccccaatagtgagcagcccgggacccaaggtggaatcgcgacccgacggtgctcctcccggtgtaggagtaacctcgccaggttactcggaaaataatcttcataccgttgagaatccactttgcctgagcttcttccctttaagcctcataaaccaccctgaagcggacactatgatcattatccccattttacagaagaggaaactgagggacgaccaaagaaacgcagcggaggaagtccccaggactagccgccccgccgcagccccgaccccccacccgcgtacccggtggccgcagccatgacgcagcctccggactcggccgcagcctccacgcagcagccgtcggggtcgtggctgaggccgaggctgtggccgatctcatgggccatggtggctgcggcgccgatggggagctccgagtggtcctggggggccgtgggagggcggtcactgcggccgtagagcctcctgtctctccctcgcccccgcccgcggggctcaccgtgctcacgcctcccgagctctcggcgcggcacatgccctcgacgggcgccaggcccactgtggcgccctggaaggcgcggcccctgggggcggagcgcggcgtgaccaggcggggccgggaggtgaggccgccccacccgggacccgcgtccgggtcagaggcacccacgtgagcagctgcgcggagtcgtggggccgctgcgcccacagcccccggcgccactgcaggaaggcccagagcgtggcgttggcgtcctgcgtgacgcggctgcggtcccgctcggtccacacctccaggccggtcagcgccacctgaatgtccagagtcctgagaagctgagggcgaggcggggctgaagccgggacagggcgccccatcgcgccggtggtccttcgtggggcgcccttcctcttccccaaaccccaccagcacctgcctgtcctgccgccgccacccccatcaccgctctctccccgccgcccccaacctggtccacgtagttggcgacttccaggagacgctgtttggtgtggttcaagtttcggtgccgagtcaagaactgggaaggcagaaatcccggtggcttgaggggctgagctggccccatccctgaccccgccaacccctggggtctctcctcaccagggtgtggtctgccacaatgtacagttccaggtacttccgggtcctgcgcgcttctcgcctgccctgcggaggtgcaaatggggaccctgagtggaagctgctgggcttgagccctgaccaccaatcccagctcccagaaggaagtttaacatgttttctggaacttgtttcttcagacttcaataaaaatactgggactcgaggcctgtgaattcccgtctcttctgatttggagggctatagatacagcattcccactcccatccgatcgatgcccctgaccctgctctggggaccaccaggaaggctggtcatgcccgctttgttcccaggatccctgtggccacaggttcctttccaggtgagcagctgctccatccgaaagatctcgtgggttgagaagtccttggagccccggggtggccagggacgcagataatagctggcattcctgctgagggtgatcaggccactagggtgcagaggggtaggagcgggtgtgagggagctctttccccatcccaggcccagcctcctctcccagagctcacctcatcccagagcaggtgcagaggactacccaggagtcggggaagccccttactcgcccttggtagtggcaatgatcctagggaggaaggggccagccccaaatctcagccagggctggagcaagaggggcaagagggagggtgtggtaggggctggctccaaccgccccttaggaatgcaaggaggagtaggggtaggaatggtgggggggtacctctggcggtgcatcccagagcccatggaagcatctcaccgtgtggttgggggccagcaccactggctgcccatctgggccgtagtgggtttctatgtatcctggggccagcagcctgctgagagggggtgttacagggaacactgaattcagcttcctcctgcctcctccaggatgtctcccagccttcctccctaaatgctaatggagcagctttatgagtgagacactcacagtgtgtcttagggaagggacaggagcaatggtgacttgctcagatcagaaactcttggggctagaggaaggagccttggtgatggcttagttgtgggaggtgtgaatatgggaagcaccagggaggacgccggggaggagtgggaataggggaagagtttgtggttcccaggggacctgcagcaggcagcaggatccacaggatcgggaggggaggagtcaggagacactgccgaagaatgggacttggagttggggaaatgcggtgacctcccccagttcccctgcctgctgccctcctttgttgggcatctggtcgaccctcttgcccccacctgccctagatccttgaaatattttcctcagacttctagaccccacatacctcccacctgtccttcagtgattgatgctcaccccctgcctccagagaaaacagaatcgccacctgcccacgctgcttccaccctccctgccttctccacacccactccggtaatgattccatcttcaggctccatctcaacaggatctttcccacacggatggatcaatcataagtcaatctgtcttctttaaagaaaatccttaacccaacctcaccttggcctcattacctccagaccacccgctaatgatggctgcttcccccctcccaggcattccaccacctgccccagctctgccccctacccctgccccacacacacccgccaccctaggaggtaggtgatgtgaccaccccattgaaagggtagggacgtcgggaaaatatggttgggcacagtggaactagagtttgttccctgtccatccgactccacgagggagaataaaatacgtgtcaagtgctcagaacagcgcctgcggtcaagcactcagtaggtgatatatactgataacataatctgggtggttttaagagcctgcgctccagcccggacacccaccccacccagcccaaggcaccttcctgagcacaggtctgcctgtcccttccccagctcaaaatctttggctctggatggtccaggacactgagcaccaaaatggccttctgtgatctggccctcctgggactctccaaattcattcccccctgctcccctccctgtagatggagaccttccaggcaggtcagacaaactgctgcccccaagtgtagccactgcatctttttcttttttcttttctttctttttttttttctttttcttttttttctctttttttgagacggagtctcactctttgcccaggccggagtggtgcagtggtgtgatcttggctcaccacaacctctacctccggggttcaagcgattctcccgtctcagccccctaagtagctgggattacaggcgccgccaccacgcctggctaattttttgtatttttagtagagacggggtttcaccatgttggcaaggctggtctcaaactcctgacctcaggtgagccgcccgcctcggcctcccaaagccaccgcatcttggtccctgccattcccttagcctggggtgccggctcatcttttccctctaggatttctttagactcagcatatcttgcaaatgtccactaggtggtgctcactcatcgccagcagggagctaacaagccgctcctggggttgggagggcggaggtgccccacagcggggctgacagcctcagcggtcctcttcagcctccagggagccaaccacaggcctgcgtgactctccctgtcatctgcaccctctctggggtcctctgcccatccagccacccgcacagatctgtgtcagtccctgccccccaacactgatcccctcctcccagccctaccccagcctggcactcactggttcttctccagctcaagcaggagctcctggccttcagcctccagggccaccagccccatgtctggcttcgagacctgggcaagaaaatgtgtggagctgagatggtggcctccaggcctcctgcctgccagggagtaggtggcctgtggagccggctggggaggaagttcttggggagaacgtgggctggggagtcagcaggaccccccacatactatggagggcgtggaggaggtgagaacatacaaagatgttcccaaactcaggatgtttgcagtcctgacaacagccacttggaagggcgttggcacagcctgccaggcacaccagcatcctccctagagaccagaggtcccagaaaggtgcccctcccctggcccgccctcttctttcatgcccagaaggggcatcaaaagcaggggaagacagaggggtgctgaggacattatgggggcatcgggtagccatggtcagggcctcctcagagcctctgctacctgaggcttgtttccaaatgagctgctgctcattccctatagaattcaaatttgactcctccacttccaattttggcaaactgctccctcttccaaagttttcctgggcctccagcagcccccgtccctccggctccgacacctgcttcactggacccacgaagtaaacatggacgccattccagccaagagagcacactggctctcagctaggtgtcaggaggctggcttggacggccagccctctctccttcccccaccctcttggcgtctcccaccctgtgggaacaccccacttcccccttgtccactcagcctggctgggggcccagagttggagccggcccaggagcttcctgggaggctgctgcgccttcggaatgtttaacccccgactccttttctccaaaaatgcactggcctggggccctgtccaagggtctcagagtctttggagggagttcttccttcgcaagtggggagcagatggtccttgcctccctggccacaggccccacaaggcctccagcatgagctcatgaggctggaatgccacttgctttattggggaaaggtctgcaccgggaaaaaggccatactcgaggtccctgttcctctgcagcccctgctatctttactcttgccctcctggtaccctgccccttgatatatacccctcatcttgaaatgtgagtgtttcctgccttttggaggggacacctagcctctactctttcttctgtaccatcttggcaggcttcctgggggcaggggcccaccggtgggggaagcagagcccctttggggctctcctcttggtcacagcccaggccagacagacagggaggcccagaggcagagtgaccccagtgtgtgtccagccttcccctcctggggatggggagggcaatctcaaagctcaggccagtgccgtgcttgaccagtggaatgggggccttatgggcctaggggatcccagtgagggccctgggttgggagctgctgggtctctgggggcctctcagccttcatggcaatgctcccctgccttccctcttgctggatttggacagtagggctgaaaattccaaacaaagagggctctctaggaggggcaggggtgtagccaatggtttaaaatcgttcagaccttagtgggtctcaggctcccagcctaaagagctgtgtgaccatggacaatttccccaagctctctgggcttccgtttgcccctctgtaaaatgagcatatcaaggctactgccctcttagtttgcagcacagatattatggcacaaacagatggggcatggttattctggaagcgtgtgaagagcgggattgggaagaggctggggcagagcgtcctgcagaagaagcacatggggtggtcttacatctgggggacatcaggagagtgaccactgcccccccgataccagaagtggattccacaggagccagtgaggctgaaggttcaggccttcgtggcagggccctgagagggacagcagtgtgtccacagggtcacatgttctggtcaactttgcaaaaggttttctttttggtgcttttttttttttttttttagaggctcctgaaaagcttcaggacccacaaactctggacccatttctgcctggtgggggtgggggtggcccagatcatccagggagggagggaaagagggaggtggggtggagaaagctgaaatgacttccatgtgtgcgggctcacgagatccagatgtccaaaccccagtgccttcttctgcccacttgaggggcaggggaggcaggggcctataggagtagtgacttggtggttctggggaccccagcaaaactagaagctgtaatgtagggagagacaaaagggctgggaggttcagggcccctgtggagggcggggagacatggcactgaccggctcctccaggctgacggtgcgccagggttgtccatccaggacccagtgcggggtgactggctgcccagggatatgtcctggagtaaagacagagcacagggtgagggggacctgaggaacacaggggcatgggacaaagcagagggaggggggtagaggacatccccagggaggcactggaggccttttggggcagacttcaccttcaacacgcgtgggctcagcctggagaaggagggacgcccgtgggcatccttggatctgaggagctatcaaggaggaggaaaagagaaggctggaaagggacagctcagctggggacacgggagtcccctgacctttgtcggggggcaggcttgggctcggcgatcacaaggaagaggccaaggccgccagtgcagaggggaaggaaagagcgcggcagccttagggatttttagatgggcagcagatgcctttagggtgagagatgtacgaagagaggacacttgtgccccccccatcatctgagaaaaacaacagccagatgttgccttgcgaggtccaccttgcccagagctccctcggggactctgtcctggtggcagggttttggtaccctggcccagaaggcccctcctcatctcttcaaggggaggggacgcttctggacggagccttggtgctccctggccgggtgtgcctaagggggctctaggaggaatcccagagccaagcattactcagagggcgcctggaatgttcccctggaatgctcccagccctccactggccccaaccactctcacaggcccgccctgcaggagccaggccccaggcacccagagcctgcagcagccctccttcccccggtacccagtcccagctcccagaacagacagcctcccccctccacgcagccctggcctcagtcctgctgggctgatggctgcctgtggaagtgactcagctcctgctaggccaccccaactccttttttctcctccaccttctctcccagactacaaacatcaaagacccttcctccaagaagccctccttgattggatgagtgaattgccatcaggcagatgagggccgagaggagtctgccaccttggaaaggaggctagaggggccagtgcagggagggctctgagtggatgtgggggaggggaaggaggggaggtctctcagcccagagagcacttaactgagagtagagaaccaagctttgctgctcctaggcctctaagggtttggggaagaggtagggtgggcccgggcacaggtgtggtgtgggtgcagtgtggtgtgtgggtgctgtccacatggccttgcgcgcacgtgctggccacgggcaccctgaccccaatgagggagagaggggcagagctggagctggagctggagctccggtgaccgggtgaatgggggtggaacccgagggagccaggctggtattgggcacatagacgcccctctcccaggggtcccatcacctcccctgaccccaggatagggctcagaggggagggagcagtggaccgcctggggccctcccctggggccagaacagaccaggcccctgtacctgtttggtccccacacagtgctgtggaagccaccgcccagtctgcatagcacagcccagccccgcatgccccctccctggttgccctccctgttcccggccaggcacttgctgtgcaggactggctaatcctcccacccgcttgcagaggttgttccagccccatcttaacatctttgtttggaggggttaccccgaggagacagctgcagtcttcccagagcactgctaaacagacaccttctatctggagaggcccttctctatctcaccaaacaaggcaacaatataaacaacatacacactgccctgctgccctgggaggagggacgaggggtgagcagggtggaggccacagctagttctgcagcctgagagcaaagcagggactctgggggactcttgggcatgggggcttcctagaggacggagccccgctgagtcctaaggggtggaggagcaggagcgggtcacacggtggcctgcggatggaagctggttgtgagagcgagaatccaggaagagggggctacggctatgggctgggggctgggctgcccccgagggggagggagccatgccctctgctttgccagcggagtggcagccgggcagtgtgggcaagtccgggcccggggccagcccaagcacacttgagcgtccctgggcaggtcccacggagacccccccaaagagtccccacgccctgacctactggccgtatggtgccggggccgtgagaccctccgcgcgctgacccgagctctgagcagaacccatccccgccaccaccaccgcgcctagcctgcccctcagggcgcaccccgcccgcgtcctcaccttgaagcaccccggcgcctggcactggccagagcagcagcagtagtagcagcagcagcaacggggtcccccgagctctccggggcctccagcccatagctgtgagctcctcggcctctaggcagcggctcgcaactccggctccgcccaggctggattgcggccgacccgtgcccggtgcagcctcaggccgccgccttcggaccttcccgcccccacctcccaccgcccgccctcgctcccgcctcccctccccgccaaccccgctcggagcctggccaggggccccgacggcgcgcgccatgggggagccgggtcgccactcccggaccgccgcccctcgagggggtggagctgggcggaggagggaatccgtgcggcccctcggatgaccggcccgagccgtccctccccgtcggtctcagagggcctctactcctgagaggaggagagaaccgctgggaaggttcttggaggaccgcggcgtggtgggatgaggcggtgggcaaaggccgcctctcgctgctgaagttggccccaggagcgcgatcttccgtggtctcctggggccgatctctgtcccctccttgctacccgtcctgccccgagggtgccctggcggaggttgagtcgggtcatccacctgcactgggtgcccccaaggataggaaggttcaggcaaccggctgccgctgtcttgggggcttcattgctgggcaaaggcgatgcagcagacggagacaacctttcttccctggcggtggccagagggcagaattgcataaaagctgcagactcccaggcctgggagaccctttcggcctcagtaacatctgtttcatgttttaaacttttgttttcctactcggtgcaaatttggatgagatgttaactttttttttttttttttttttgagatggagtctccctctgtcgccaggctggagtgcagcggcgcgatcttggctcactgcaacctccgactccctggttcaagcgattctcctgcctcagcctcccgagtagctgggactacaggcgcgcgctaccacccccagctaacttttgtatttttagcagagacgaggtttcaccattttggccaggatggtctcaatctcctgatctcgtgatccacccgcctcggcctctcaaagcgctgggattacaggcatgagccaccgcgcccggccggagatgttaacttttaagcaaatcttttttttttttttttttttttgagacagagtttctctcttgttacccagactggagtgcaatggcatgatctgggctcactgcaacctctgcctcccagattcaagtgattcttctgcctcagcctcccgagtagctgggattacaggcattcgccaccacgcctggctaattttgtatttttagtagagatggggtttctccatgttggtcaggctggtctcgaactcccgacctcaggtgatctgcccgcctcggcctcccaaagcgctggaattacaggcgtgagacaccgcacccagcctacttttaagtaaatctatttgtttttgagaatttggaatgtagtaatttggttagtgaaagttcgagcagtgagagaaacctacattcacatatctcaaaatcaaaaagtacagaaagcatagggaaaagtctccgtgctcttagccctcctcaccaacaggaaaccaatatgattagtttctttcataggcttttagattattttttcacactcaagacaatacagacatatttttttctcttattaacgtttttctgcactttgattttcttttttttttttttggtcgcttaatacaccttagatatcagtgcgtttagagggtccttgttgttcttatgattattatttagagacagggtctcactctgtcacccacgctagaggacagtggcctgatcatgcctcattgcagccttgaaatcctgggctcaaggtatcctcccacctcagcctcctgagtagctggaactacaggcacacggcaccaggcccagctaaaatttttaatttttctgtagacaggggggtctcactttgtttcccaggctggtctcaaactcctggtcttggccaggcgcagtgtctcatgcctgtaatcccagcactttgggaggccgaggcgggcagatcactggaggtcaggagttcaagaccagtctggccaacatggtgaaaccccatctctactaaaaatacaaaaattagccgggcatggtggtgagtgcctgtagttccagctacttgggaggctgaggcaggaaaatcgcttgaactcagaaggtggaggttgcagcgagccgagatcatgccattgcactccagcctgggcaacaagagcgaaactccgtctcaaaaaataaaaataaaaataaaaagaactcctgatcttaagtgatcctcctgcctcagcttctcaaatcgctggaattacaggagtgagtcaccacagctgtccagctacgagattattacttattattactactttggattttcaaatcaacttcattaaggtataatttacacacaataaaatgcacttattttaagtggccagtaagatgagtttcgataagtgtatataactacataagcatcactataatgcagacacattccctcactcacagaaagagccctgtgcccttccagccaaacttgcccactcccaaccccagacagccactgatctgttgttctctgtctatagataagttttgcctgttctagaatttcatataaatggaatcatgcggcatgcactcttctgtgtctggcttccttccctctttccgatgtttttgagattcatttacactattttgcatatcaatagtttgttccttcgtattgctgaatagtgttcggtggtttgagggaaccacagtttctctactcaccagtgcaccatagggttattttccagttaggggctcttataattggaactatatttgcacagagagagagagaggaagaaagagggagagagatatttattatagcaattggctcacgtgattatggaggccaaaaagttcccgaatctgccatctgcaagctggagaacgaggaaagccagtggtgtgattcagtttgagttcaaaggcctgagaaccaggagcaccagtatggaggtggctcgagctcagaacaagttggggacaggaaagcagagcagcgccccagagcagcccctcagcgacacctcttcagtaaagcaaggctgaacacagaggggctggcttcagtgtggatgtcaggtacagaaggcagctcgaggagctactctggcgttcttgcttactggtattcttacctcgaactggccaactcctacttaaactgcaggccatggctttaatgtcctgtcattcagaggctgtcccttacccaaagccaggttagcatcccctgactgacacttctccctgcaacacgtttcagaaggccctgtagtcgtccacttccctgtctctctccccaagctcctgagctccatgtggtctgggaatatgtgtgttgctcacttcctagcacagtcagtgctaataactgactgtagaggggacacagtcgaaaagccacatggggatcagagtcatccttacacagttgacacctcccaaacccagatgagctgtgtccaagtgcaggtcagaggaattttctgccgaagtctctgagaaagggtttatttacattttgaggttgcaggggaggagatgaggccatcaaaccaaagctgaggaagagggatcctaggatgcaccgagcagctccgggggcgcctgacagcacctgggaaagatggcttctccactggcttgttggcgtcaccctccagaggggcatcaggaaatgtcctgggaaccaggcaaaccagtgagcattaacccttaggagtgcttggcatgggtgacacccaccatctgtaaacacgacttctcccaaggagtgacgcagaacaggatgtctgagggaggcactccgactccagccttcagagatcgccagggtggcacctggtgacgacaggctgatgcttgggtgccccggaaaaagtcatgtgtgtgaatgggggccccaaagccaacgcttcatccctgacagcctggtgcatttagaggggaactttttgtcccttggcaaggtgggtggaatttcaggttcatagggcaagggtattttagctttaatagatattgtcaaacagttttccaaagtcattgtacacactctgtgattctacttaagtaaagtttaaaaacaggcaaatcaaatctatggtgttcgaagtcaagacagtagttacccttgtgggggctgcaactggtacagagtgtaaggggggactgtaggatggtctatttcttgatctgggtgtgttcgcttttggaaaagtccttgagttgcatttataatgtgtgaacttttctgtatgttacactttaattgaatgtacaaaaagtctcaggaggcctcagaccactggaagcggacacaactaacccctctgagagcctccaatccaagatggacatatgtccccttggaagtatgcagaagcaggtgaagactcctaagccggatattcccaaatccccccagtagctgcagcttcagcagctgcttatggtcctccctacaccctctcttccccagacagcccccaaacatctggctgcatttgacttgctctctccctgtcccacctctggatttagtccatgttctccaccctccccactgtcagcaatgtagacaagacaaacgcttagttcacgtgcccacctactgcgtgccatgcacggggctggtcattgtgggtggcaaatgtgagcaacacacgaagcctcaaggagcagaaagggacacaaatcacttcagcgtaaggtaatttgtgataaatgtcatgtaacttgcagcccctggccccctcctacagatggtgtctaagaataaaccccactaacatgtgactcctctgttctagcccagctgtttgggttgcaagaaagagactcactccagttgcgtcataggatggagttttattgggaggacattctggacgggctcccagcaagagtctggcaatggagcatgaaaatgaatgagcctggaatgagggagggtgcggcctcggctacacaaagttcacccgcccccaactgcctcccagcgtgttagctcctgtggcaactccccacttctctctctgtttttcaacccaaatcctagagcagagggctcttcgctcctcacaccatctccaccaggctgcagggggagtcactagcccactcaagagctctctcctgttggtccctgattcgcaggggcacgtcattccttcttggtaactcattctctttaacagcccgacacagggtctccaggaaaaggacaggagctcacacagtcatgaacagagatgcatctggagcaggaataaggatgctgacaacatctgtgtctgccctccactcttgtaagggccagtaaggtagtacccagtccctgggggtagggggggtggtggtgggaatgagggcatctcttctttcaggggccaaatctggcacaaggatgtctgcttaggcaactccactgcctggcatgctctctccctaggaaaacaccaaaccttttttatttcctcagtcttagtgtgagagtgatcacctcttccaggaagcccacaaccagaatggccaggggcacaccctggccctcagtagatgggcactgagacaaaacatggcctgctggtggcattcccaacaatgtcaaaagtctcagggatgagctcacagttgggagtcctttggaagtccaattccaaatgtcctctggactcaaaataaaaactacatttcccagtctcccttgtagcttgcagtagccatgtgacaatactccagccaatgggaagtgagtggaaaagtcctgtgcagcttctgagttgcgtccaccatgggcatgggtgtgcttctacctccactcttccttcttctggctggagggcatgtggacaaagcggggccatggtgagcctcacaatcaaaggcatcattttagggatagagaaaaggaagatagaaggatcctgagccccaacatcataaaccatcgtaacagccagactagcgtgggagagaaaaataaaattctatcatgttgaagtcactgtatttggtctcttgttagagcaggctgactgatactctgttgaatacagaatgccttggtgagcctctgaggatgcaggatgctgcaatccaaccaaagtccagggtgactttcgaggagaaggatgtgaaagggcagggcttcctttgagggagaaatggagagaagggaggagatccagagaagagagagcgagatcagctcagtgctcttcagtgtcctccagggtcaacaccctcctgggcagacctctcaccacccatttttgggggggcaagaggcttggggccaggtcataaaaagtcagatgtcacagagctgttttcgtagaggcgggcaggactcaacactgcctcattcacattcataggctggagtcatcacagattctggccactttctcctccggagggcaggcaacaccactggtcagcccaggggtggggcacaggttgaggtctcacatgtggctgcatcaggatcaatgagcttcccacagagaaaaccctggtcacaggaggcctctgggagccagggcaggcccccaggcccccagcctcaggtggggtcccaagaggattggtgggagtgtgcatggctggaagtgtgacttggagccctggcctaccaggtgaatcagctgcagaagggacacaccacaggggaggagaaactgactttcacttctgcccaggtgacgggcaggcttgggagtggggaagaggcctcagaacaaaggtgggggagtcagaacatacgtgtcttggaaatggaggggatgctgccaagtccagaaagtctcccctagtcctctaagccagccgccagctgacacagggattccctctgccccgagcagaacagggctctcctatctcctgaggggctcctggttccctgcacactctccccaacctccccttggtcccaggcaccatcctctaaatgacagcagtctccagatgccagttggcactgtgggttagctgggtattatatctgcccgtgtgtgttgaatggatacctgcgtggtctctttctgaaaagccatctccaccgaattctcgcccatgctctgcttacaaacacgcctccttctgcaaggcccggagtggactcagagagcctctcccctccccacctcctgcccccattcctctcccgctccccacaggctggctccagaccacaagagcgtgggaacctcatggagagtgggtgcttcctctgtcttcctccctagcccttgctttagcacagccagggcagagaggaggaaagaaggaaactacagcaaggaggatttagggacaattctagaagggatttccaatttggaggggcagtctgggaagtaggcagcctgtgaacttaataggaggtcctaaaggacctgggggaatttggggagaagacgaggtgggctgccttaccccaatcttctggcccactcccagctccagacccacctccaggtgtagcaggcccccaggcccaacagcaggagcaggaggcccaccagcagtcccaggacccagagcagctgctggaactgatgcaggcggtgcagggctggaacacagagcgggactcagagcagccacagctgcaggcccccagtgcttccttccaaggggacccacccaagatgacaccttctaacttttgctttatcgctgaagctctccacacaagggtgccccgagcaatcagtttagagtcgacaggcaaatcatgctgcagcaggagggatacagggaaggaagcctttgggcctaagagctgggcttttgtgcagagtggcctgggagatggagccccctcccctcacctctgaccccaaagtaggtggaggtagaggcagagcccaggacatttgaggcagaacagatgtattccccttggtcgctgggcctcagcgcctcgatgtccaccctcagggcattgggggaagccaggacatggatgtgtggctctgcaggagcaccctggggctgactggaggccaccagtcgactgccaaggtggagagtcaggctggcgagcggctcgctgtccactcggcaatccaggatgccccggaggccaccctcaggctccacgaagaccatcatggtgggcgtcttgggagggtctgtggggaggaagggagtgtggtgattgcagacaatgaccacaaatttctccctccctgtacccatgcacagtgactttgctgctcctcccattaagaggcagaacctatttcctcactccttgaatctgtgactcagtttgaccaattgaagaaagaagtgatgttgtgcaacttcagagccagacctcaagaggccttgtagcttctgctctacttgttggaacacaacaatgtgggaagcccaggccagcctgctgggcacatgtggcccaactggcagccaggagcgtgcagtcatctgagaccactgggcaactgcagccacatgaggtgtgaacaacagaagaactccccagctgagcccagcccacagaattgagcagataacatgacttttgtttgaagcagtaagttttgttgtggtcaatagcaatagctgactgatacagtgtaggccttggtgaaggctggagtgggagaccaagactgatgagggcttatcgtgtgccagacacactcagcacgctttatttcttttggttttttctcttcttttcttttcttttttttttttttttcttgagacagagtctcagtctgtcacccaggctggagtgcgttgtggtgatcttggctcactgcaacctccacctcccaggctcaagtgagtctcctgcctcagcctcctgaatagctgggattacaggtgtgtgccttcatgccgtgctaattcttgtatttttagtagagacggagtttcgccatattgaccaggctagtcttgaactcctgacctcaagtgatccgcccacctcagcctctcaaagtgctgggattacaggcataagcccctgcaccagccatttatttcttatacaacttgcaggatgaggcgaatgatgtattccccattttacaaggtcacccaaccagacagcgggagagccaggattccaacccaggactcaatatccgtgaagccttcactcttggcagacagaagaggaggaagaactgaggtgggcgtgtgagatgtggggagactaaggcggaggagggggttcacactcacagagcacacggagcatgactggagcagaggcagcagccccagtggggagctcagccaggcagtggtacatcccagcttgagcacgagccacgtgggtgaaggcgagagtgggcacaggctccgcgtgcagccgccggtcattccagaaccatgcaaaggtggagttgcccacaggcccagggccacccaggaggcggcagctgaggttcagggcagcgccctcaggcacgtccaggccaggctctgccaccacgcgtgcacctgcgggcggaggatagagagatgattggggatctgtaggccttgggggctggagcctctgggtgggacctctgaggggcctctgcacattgtgggaaggtctcagtctgacttggtatagggctttccaaggtggaaccatgccccctccagtgggagctgtgccccctccaccagattaggcttctcaaggcagagctttctcagaccagacagcccgctctagtgggagctccagcccctctcgtggacttggacctgagagcatcagagcccctcctcctcccctctcttccactcaccttctacctgcaaccgcccgatggtgctgattgagcccagcaagttttgggctgtgcaaacataggtgtcatcacctgcaggcacatcttgcacctgcagccgtagggcgtttcgggccacctggacatggcctgtccctgatgccaagctgtggaccccgctgctcgtggccagcaccttgccatcatgagatagggccagctcagcaggtggctcactgtccacagtgcactgtatcacagccatggatctggccctggagtcccggaaggaggacaggacagcgtcctgaggggcatctgtgggcaggcagggcacagatggggaccttgcttaggcaccctgtactgctcattgcctagctgcctggggttggtcaggctgaggcctctggaccaatggccacttcctagaagtgacaccttcccaggagtcctgtgggcagagtgctccaggcagggcttataggactgtctctttctctagcacctatgtcctctttccccaactgcccattcctgggcccactgcagtcctttgcccactcccaccagagcccagaagcaccctccaccaccctcctcctgggcagccctggccaaggaccctctgctcacagaggacttgcagggcagcaggacgggagctgcgggtgccctgggcatcctgggcctggcaagagtaggcgcctgcatgagcccgcgtggccaccaggaatgagagtgaggcagctggaccctcctgcagccaacgaccgttgtggtaccaagtatagagtgtgggtgcgtgggcagcagggtccgcacaggtcactgtgatgggggcaccttcaggcacggcagcctccggagccaggatcacccgcacacctgtgccaaggaggccaggatcagccgggcccagccggacaccacagtgggcttccatcccagtgggcttggcctaggccctgccttaccctccagccgcagctccagggacgtgttggcctggcccagagggctgcgggcagagcagctgtagaaaccctcatccctgggctgtggccctcgcagctccaggcgcagggtgttggggacagaggctgctgtcgaggaggccaagaggcgaccggcgtggctgagggccagctgggcgggcgggcggctgtccacagtgcacagtaccagggccagctgcccgccatggctctccaggaggtaggtcaggcgcaggttgcggggcgcgtctgcagggcatgagaggcttacacggagtcacaggcagcagcctgcaggaggccagtttgcaggtggcattcaaactcaggagggccctggctccccacccctatggctcccaaccacccagtctgaggcactgctcctctgcccagacaggactcaccccagcgccccctactcttaatgctccttgcccagtgctccactagctactgggtaccgagttccccactggacacctgtcgggttccggccatgccgtgatccctgtgggcttctgtcattcctgtgagtcccaccctgcatccagccagactcacagaggacgtccaaggtgataggtctggagaggcggggtgcccgaccaggggggcccacaccgcagcggtaggaggtggcatccctgactgtgacgttgggcagggggatggagtgggcatccaggcgctgctgcccatcctggtaccatgtgtaggtgagctgggccgggtgagtggtccacacaaggcaggtcaggttcaccagctgcccctcccgcacggtagccccgggccacacctgcacattcacagctggggagagggagggcacaggacaccagtgagggtcttgaggctgtgtacagcaggccacctgtctccatgtgggtgagctactcctactgctggggagccccttggcctttgggagccttgggtggcccacctataaatgtggcttagaagtcaagcttgggaatagcccactggctcctgagtggtcccaagtagagttccacagagtcctggaaagccctgagcccctccctgaccctggctgggggcaaatggggagaccacagacctcccctcccctgctgcactttctcctgaaattccctgtttagttttatccactgggcatacttgtaaaatttggtgtttataaaaggttctcctaagaaactcaagtctggagtccaccatcgttaggaagggtgggaatggggactattcccgtgcccccaggcttctagaaccctgtcccacctcctctcctcttttaaaggacacacacacacacacacacacacacacacacacacacacactgaccttgagcgtcgaagtcagctgaggccgaggcctggcccagggtgttggaggcctcacagatatagacaccctcatcctccagcatagccccgtggatctccagacgcagtgtgttgggggccacagccacatgcagcctgggagagctgccttcgggtccccccacaccttgtagggtggaggccacaaggcgatccccgtggagcagccgcagctgggccggagggtcactgtccacacggcacaggaggaggcccagtcgtccagggcctgtgtccatcagggtagtgagtgtgacgtggcgtggggcatctacacagggtggggagtggtcaggacccagccaggggggtccctcatccagggctctgtcatgtgacacagcccaggactgggggactgcattccttcccccacacctggatgggacaaaagtccttacaggacacgtggaggctgatgggtgcagctaggctcgtggtggctgagcctggggcctgggcttggcaatgataggccccagcttgtgtcaaagttatggctgcaaagcggagcgtggccgaggtcgactcctggaggggctggccatcccgataccaacgatatgaggtcccctctgggactcctgtgtgtacctggcagctcaggaccacagcctggccctcttggagctcaggtgatggtgacacctggacccaggctcctgcaggggaaaaccaagagcaggtgagggctctccaccacacctctcacagtctgggaccatgtgcgtgtccacctaggactacacaacccaaccccatgtgctggagccgcagccccttccagaccaccgccagggcccactcagccctatgccttggcccctcctgctccccactctcctgcacaggctccatcctggcatttacctcccaccacctggtgggatggttttactgtgtcagtcatatctcgcctaccaaagcgtaagccttatgggcactggacttgtgtgacctgtaaccccagttccaggcactgtgcctgcatgtgttagctcctgacaaatgttggttcaacccataaagtactgaaaagggagggatttagatcatcccggggccattgtcctaactaggatctggactcagcatgggtgaccgagggcttggaagggaatgttagcagctatgttatcttgagcgctctcgccaggccagccctgcatccagactccaggccacaagagcacaggacctggggaccaggcaaagggcagctcctcagtggcccctgggtgtgaagcaggagaaccccaggttgcagggagtgagatggagggacagctggaatgctaagcaagaacacagaccatgcctgagaccacagctagcagggtcatgcaactggggaaaagctcctaaaactcaaaccttcaatttcttcctgcgaaataggtatgctaagtaagaaaagatacacagaaccaaggctcaaagtaaatgtcccaaaattggtgctgtcggtcaccgtggtggaagaaacactcatgttcctttgaccttcgcattatgggcattatctttcctttttcctggtttatttgtttagggagaatttttttttttttaagacagagtctcactctgtcatccaggctagagtgaagtacaattttggctcactgcaacctccatctcccaggttcaaacgattcgcctgccttagcctcccgagtaactgggattacaaatgcccaccaccacacctagctaatttttgtatttttagtagagtgttggccaggctggtcttgaactcctgacctcaagtgatccgcccgcctcagcctcccaaagtgctgggattacaggcatgagccatggtgcccggcctgagggaggatttttatagagactatatatatacacacacacaaacacacacacacacacacacacacacgtatgtgtatataaataaagaatatgaatatattatgcataagaatacacataatgtatatttgtatgtgtatatactcatacataaacatatatgcataatataaatatacatatgtatgagaatgtttactatgtaacaaaattatatgatcacaaaacaagttatttcagaaagtgctcccaccaagcaagccactctgtgaattgccattgcctcctagtggctgctgcagttattacaggtgaaaatatctagctggaggcaaagggaggccttctgctggctggaaactgcccttaccaggactgaaaaagacatatttctgcacaaaattcacagcacccagcccaaagtctgaccagagtagtccccagggcatcagagtctaccatatcttcagaagactgacactcacctcggacctggaagaagagtgaggtgttggatgatccaagaacatttgtggcctcacagcggtagctgccagagtccccaaggcccagttctcggacctctaacttcagggagttggcctcagctttagcctggaaccgaccatgggatgggacctggggacccaggctggtggccaggaggtgctccccatggaacaaggccagcaaggccagggggcggctgtccacagtgcagatgaacagagccatgtggccctggcccatgtctaggagggctgacagctttggacggtccgggggatctgcaggaacagagggagctgaggccacccagcctagctcaccacattacaactgccacactatgtcccccacctcctgccacacacacagcctaagccatgctctttcctccccaaaccccagcccggcccctgcttctccccagaccacccctccaccctccaagtccccaggctgcccatgccagtcacccacagagtacactcaggagcacgggagtggagagctgggcaccagcctcagtcaggatgcggcaggcgtaaagggcagcatcagttctggccacgggcagcagtgtcacggtctccaggggaccctgggcccacagcaccccatttcggaaccaggagaagttagcagggctgccagcagcttcccggctcacgttgcaagtcaagttggcttctgtgccctcctgaagtgtgtgtgatggtgcaatggccaggacagtggctggagagcaggcggcacagcttactgaccacccccggcccccaggagccaggggtccagccgcccagcctggaaggagcaggaaggaggccccctggggtgcccacagggttggggagaaaagcaagctagctcacagggcagcctaggagaagtgggccctggggactgtgggggccctgggcagagagggttgcagtacagggaaggaggacaaggcagcccaactgtcccagctggggagtccttcctcagagaccagctgtgttgcctatccccggcctgaacagagatcatgggaaggagcagctccgctcttcctgaatgtggaggagggcagcgaagggcccccactgctgcacagagtggttttgcctgattagatcctcctcggagcagaacagtccagagctccagcccctgcccccaggccacccattccctgcctgactcaccctggccattgaaggtggctgaggtggaggcgttgcccagggcattgctggcctcacagaggtacaagccctcctcttccagcaaagggttgtgaatctccacacgcagcaagttgggggctttggtgaccttcatgcgtggggaacagcccccacaggtgctgcagccaccccctgatggcagggaagtggccacaacacggtccttgtggagcagctgcagcctggcgggggggtcgctgtccacacggcacaaaaggaggcctcgccgtccagccccggccccagcggcatcaaggtccagcctggtggtgaatgttggttgtcgaggggggtctgcagggaggaagaacatgggcactcatcccacggatgctccagggccccacaagcctggctaggctcccagaatacactggacaaaggcagatcccgaaggctgccccaagcagctgtgcagactgtgcactgcacaagggcagccagaccagggtgggtggaactcaagctaggctcatgctcctcaagctaagctgtgccctgatgcctactgagtcttcccagaagaaggagcaccattttctagctcagacaaaggtgctgtatgggctggctgccaccttgcataagtcccatctgctgctgagcagggtgcccacctagcaatccctgggggtcatgctgtctgctcccaccctgcacccaatgccttaccacggagcctcccctcaagatctgccctgcagcttatctgtgatctccaagccagctcctgtgatactagcgaatgcatagaatggcctcttcctgaaggcttctggagacagttggccaaaagagagcaatcagccaaggcccccatgtgatctcactcagacaccagaaaactttgcagaggcagctgccctctgacagttccgggacgtggctccggcacacatgtgtcaggggaagcctctggaatcaggcccttggtcttacacggagcctccccgcttggcggatgcagaggggctgtctgtccctgtgctgaggggctttgccttggtgtctatgggagcccagcacagcctgtggggcatgtgcacaaatagaggagtgtggtgtcccagggctcacccatgaggacaaagcatggatgtggtgcccatgctgagcttgaggctgggacagaggagcccacagggctggcattggagggtaaagacatggggaggtagagaaggccccagcctcatttcctaaacttcagccccacatggaaagacccactgtggccaggtctgtgacccagccctcccgatatagaccgtggggcagggcaggacagggctggggggcctagaggaggtggggtggctggtgggtcccggcaggaggctgcaacaggtggtggctgctcacagagcacagtgagaacagctggcgaagaggggccactggcactgtggccgtcccgggcccggcagtggtatgagccggcgtcagtgctggaggccgcggggagcaggaggctgctgccgggaccctcgtgaagcagggctccattcaggtaccaggagaagcgggcatcaggtgtggggcttaggccgcttctgcagctcagtgtcactgcctgtccttccaccacctcggctgccgggctgatgaggagacgggcggctgcggggagaggaagaggctgggaagggtccctcctctcaaccccacatgctgccctatatagaaagccttccagggttctcctttccccacactactgtaggtagctctgggctttgtggtgcatcaggagggtttgccctttaatgccaaatcagatctattggtagtagatggctgcagcatggttgaagattcagagccagagcccaggcttatgtccaacacctggcttggctgggcatggtagctcatgcctgtaatcttagcactttgggagactgaggcagaaggatcgtttgaggccaggagttccagaccagcctaggcaacatagtgagactccatctcaaacaattttttttttttgagactgagtctcactctgtctcccaggctggagtgcagtggtgtgatcctggctcactgcaacctctgcctcccaggttcaagcgattctcctgcctcagcctcccaagtagctgggattacaggtgtgccaccacacccagctaatgttatacatgtagtagagatagggtttcaccatgttagccaggcagatctcgaactcccgacctctggtgatccacccgcctcagcctcccaaagtgctgggattacaggtgtgagccactgtggccagctttttttttttttttttttttttttttttgagacggagtcttgctccgtcagccaggctggagtgcagtggcgcaatctcagctcgctacaacctctgcctcccaggttcaagcaattatcctgcctcagcctccctagtagctgggaccacaggtgtgcgccaccacacccggctaatttttgtatttttagtggagacggggtttcaccacgttggccaggctgatctcaagctcctgacctcaggtgatctgcctgcctcggcctcccaaagtgctggaattacaggcatgagccaccatgcctggccacaattttttttttttaattagctgggtgtggtgacatgggccgtagtctcagctatttgggaggctgagatgggaggatggcttgagcccaggagtttgaggctgcagtgagccatgaacataccattgcactccggcctgggcaacagagcaacaccctatctcaaaaaacaaaaagaaaaacctggcttgatcaattagctaccatgccctcaggaggagggaaggacagtgcacataccgaaagttggaagaccgtacttttcttttttctttttcttttttttttttttttttttgagacagagtctcactcttgtcacccaggctggagtgcagtggcgctatcttggcccactacaacttccacctcctgggttcaagcgattctcctgccttagcctcccaggtagctgggactacaggaactcaccaccatgcccagctaatttttgtatttttagtagagatgggatttcaccatgttggccaggatggtctcgatctcttgacctcgtgatccacccacctcggcctcccaaagtgctgggattacaggagtgagccaccacgcccagccagaagaccctacttttctatttggcttcccacatctgactgctagcatagagcctgctcccagagtttcataattaaaaaacaatgaatgcttctgagggactctccaagtttagggtcagggtaggtgcaaaaggaatgatgtgacctgttgtgtttccctttttcccttgacttccaggaagctctgccgttgggtcactgcacagcccctgtcttttatgtggcgtagccagttagctcagtcctgcggttgagtccactagacttctagaaggaacagactggagcaggctcctcctcaggctccctccactctccctggctgccagtgcccatcttaccattggcatggaagtccagggtggaggttgcatttccaagggagttggtggctgagcacttgtactccccactgtcagtttcctccaggtctcggatctccaggcgcagggagttgggaccagaggtaccactgaagcgtgggctgtgatcactgtccccggaggtggaggccaggatatgacccccatgtgacagcaccagtgtggccaggggctcactgaccacagagcagtgaaggatgcccacaagtcccgcctgggtctccaggaaggctgtcaggactggagtgagaggcgggtctgtgtggagacgagaggtgggcctgtcaccctcagacaagggcattccctggataccctgatacaacccgtgacctctgcaccgctttgtcccacactgccctgtgagaagggggtgatcccaaagtgcctgagtgcctgctgaatacacttttgtccttggctgggctgggtacgtcactctgttgtcccagtcagtgttcaaggccaccctgcaagtggggataaaagccccacttcaaagatgagaaaactaatagagagacctggtgagggacagcacctcagccaggtgaccaaagtgagcatcatcagcaatgggacaagctgacacagagtgcctcctgacagggcagagcagcatgtccgcggccttcccacccagagggcatggtctcaggccattcaagtcaggcaaatgtggagtgagggacctcctcagaacagcaggcctgcactctgcaagtttcaatgtcaagaatgacaaggaaagactgaggaacagtctcagactaacggagaatgaagagacgcaacgacccaatgcaatatgtgaactgtgattgtattctggaccagaaaaaaaatggctacaaaagacagtattaggtccactggtaaaatgtgaatatagattatagcttagataacagtcttctatcagccaggtgtagtggctcatacctgtaatcccagtactttgggaggccgaggtaggtggatcacgtgaggtcaggagttcaagaccatcctggccaacatggtgaaaccctgtctctacaaaaacacaaaaattagccaggcaggatggtgggtgcctgtaatcccagctactcaggaggctgaggcaggaggagaatcgcttgagccccagaggcggacattgcagtgagccaagatagcaccattgcactccagcctgggcaacacagtgagactccatctcaaaaaaaaaaaaaagtcttctatcaatgctaattttcctgatcatgatcattgcattgtggatatgtaagagaatgatcttaggaatttagcggtaaagaagcctcatgtctgcaacttcaggaatataaatatgtaggtagatacataaataacatatgcatatgtatatagagtgtccatatatgtataagtgcacatgtccacatagagtggatgtgcatacacacaagtgcacctgtatatatgcaagtctatatccatacatttatatgtatgtatgtgcgtgtgtgtgtctgtgtagacagcgagaaagattaagcaaatgtgccaaaatgttaataaatgggaaatctaggttaaaggtatataatcattatttgtctttctctgcaacttttcataagtttaaacttccaaatataaaataggagggaactagggaggtcaaagcattgcccaggtgtgcagagctgggacatgagctcaaggccacctccaggtaagtggccttgaagttcccatgcccaggaccccaacccttccttggggctccaccatctggtcctgctctgactgtgtccagtgccaccccaccctggcctcttacggttgactaccacgctgacagggcccgagcgctcgctgccatggacgttctgcacctcacagaagtagaagccagtatcagccctagtggccaagtgcagccggagggtatgggagtgggcatcctccagcaggacatggttcttgtaccagctgtagcggagatcactgggtgcctcattgggtgtgttgcagactagtgtcactgtctggttctccaggatgggacctgctgggctcacctggacctcagccactgcaagggcagcatagggagtgctggggggtcccagccaacttccagccccagccccatacagtccccgggtctcagccaatcagcctcaatctctgcacatcctacaccacccgcctgctgctacaggggagcctcctggagtgctctgcatctctttgtcctgctcaccaggatccccctgacaccccacccttcgtgggggtattgtcacctgtctcatggtaaggcagggctgggactccacacctgcatccaggaagcactgggttatgccagttgctggccctgccctgccctgtctcccctccgtccctgaggcctgagctcctccctattctctggccaatacgcaaccttcccaagaactcactgaagatgtggaggctgatggggggtgagaccaaagagcccacgccgttctcagcttggcaggtgtagacgccagcatcgctccaggctgcctggggcaggtgcagcacaccagtcttggtttggaggcgtaccccatccttgagccacttaatggaactgactgcagggtagctgctgttcacctggcaggtgagtgtgaccagctcacctggaaggatgttcctccccgaggggctgaggaggatcttcacacccttgggggcatctgcaagtcacagtagggggtattgggtaaggtgcttggggagggcagaggatggcacacttcttcttgcccccctttaaaagctcagtcctaaggaagtatgcccagataaaacagcagtccccttcaatcctcacccagggcatgctctgtctgcccatgtccgtccctttcccgccccctgcgcctgatgcattcctatgcccattgagagctgatcatgtgacgcttggccagcgtccagcctaccccaccagctgtagttttctgcttcccaatgctgtccattgctcctgctctatttgggatgagctccacacacagggtcatgggtaccccactgctagctttagtggcctgtggaagctattggtaagggaccaactacctagtgggagggggccaaaggcagcatcaaactagctctgaaaatagttacccagtttgtaagcaagaggccaacaacacaaagaactgcatttccttaaatcttgttccaaagcctctctctgtgtattcaagtgttttattcttatttttttagaaagaggatctggctcagtcagccaagctggagtgcagaggcacaatcatagctcactgcagcctgaaactcctgggctcaagtgatcctcctgcctcagcctcccgaggaactgggactacaggtgcaagccaccacatccagctaatttttgttttttaatttttttgtagagacagggtctcactatgttgcccaggctggtctcgaactccttgcctcaagcaattctcctgccttggcctcccaaagcactggggttacaggtgtgagccactgtatccggcctcaagtgtttaatatgtgccaggcactcttctaaatccttgacctgggtcatctcctttatttgtttttgttgttgttgttgttttttgtttgagacacagtctcactctgtcacccaggctggagtgcagtggcacaatcacaactcaatacaactccacccccggggttcaagcaatcctagtgcctcagcctccttagtaactgggattacaggcatatgccaccacacccggctaatttttgtatttttagtagagacgaggtttcaccatgttggccaagctggtcttgaatccctggcctcaagtgatccacccgcctcagcctcccaaagtgatgggattacaggcataagccaccgcgcccggcccatctcctttaatttttatcataaatctgtgagacaggaaccatctattgttatcttcgtcatagactgagaaaacagagccaggcaggaaagggataaatcccacctccccagcatcctccagcacggggtaaatcccggggcacttgctgccaaccctgaagctgcatgggagctcctgttccccaaccctttgtgtctccctttctctgcccagcctggcctcaaggacaagccccttcgaagcagtaggaggtggagggaaccatttaacgaagtccttggggctcagcagtgtctctccacttgccctaccctggaggcccaggagcagcctggttttgcatcaggagcaagggttccgtttctgtgggctggagaggggctggtttctgtcaggagcaacagatgcgctcagccacaagggtgtgtccccagacaactcacacttcacttggaggtgaatctcgctctgagccctgtgattggccacggagagctggcagcgcaggatccggccgtggtcctgccaggacatggccatgtggagggtctccaggtggccgacgccggtgggctcaaacttctggctgttgaaggtgacagagcgagcagggtcctggccttgccactgcagtctgacctgctcctgcaggcatacgtagggagtggagcagttgaagtccacctctgtgccctcgagaagctccaccggggaggcaatggtgggcaccctgggctcctctgaggacagagacagcagtgctcaggacccgcttttgccacccctgagatccctcgccctggaaaccccagctgaggagagagccctggggagggggcttttaggggaaggaaagacgctttctactccagccccacttgggtgaatacaagggagaaccaggcctgggcctacgccggggctggaacagaggctgagactggctggggttagattcaggacaagggctggggctgagagccaaggggtccagaagcagcttgggaatccctcccggggggcagccaggccaccccacttatcacctgttactgtgaccaaggtgcctttcacatctgaccagcggttgacctcactgatctcgaagcggaagttgtaggaaccagagtcctcgggctgcaggtccttcagcagcaggttgcacaccctgtgctcggggttccccatgaactcggtgcggccgcggaagcgggcctccaccagcttggggtccgccgagtggctcaccacctgccgctggcccgagtagtcgtagtaccagatggccgtgatgccgtcgggcacctccacgtcggcagggaagctgaagatgcaggggataagcaggcaagaccccttcacaccctgcacgtcctggggactggagacgccccatgaggcctggcctgggggaagaacggcagggggacagaggggagggtgatacaggcctcagggtgccacagagccctgcgacctgccccagagaaggtgccccagctgggctcccaaattctgccctgccccgagaaatgcacacttagagcagcccttctcagtgccccaggggtcagtccactgcccgaggctgctcagaggtttggtagggtggctcgaagacagatggcagcttcctgcccagctcctggccactgcccgattgggccctcccttgacctcagcaaccaaacatgtgacccaggcatagtctaatctgccaagggctggacttatgaaggctggaccctggaagacaggcactaggcccgcaaagcttacctgctgggaagaatgaggccaggaggagaagcttgggcaagaagcccatagcaggttcttgtgctgctcctgttgcctaagagggtggtgcgcactgcgctggctgggctcacaggggcctccagggacacctctgggcactttagccccagcacctgctagaagtccgagcctgtgtccccacctcctctgctggccaacccaataagagggcagggctcttaaagacctctgagtcagacaccagcagagagccaggaggccacgttcccagctcaggctgtgcccaggaatgccctcacttggtggcctgcctcagaaaagcctgtgtgtcccttggccctatcccaagttctgctttcccagcccctcaaggataccaccctaaggcagatgaacagctgtttctccctcttccccacttccctgccccctccccaccacccaaaccaacaggaactggagcccagagatgcccagttactcactccaagacacccagctagaatgatggtttcttcctgaggcttgtctcctaccacctgccttactaactatagaccataatggggctttactgaacttgccgaagtgctgcctttaacagtcactcccctgctcaaaaaccttctgtggctccccattgcccgtgagatgtgaaaagtcctcatttcctgcccccagctctgtccccattccctgctctccgcagacccactctgggggcagttctgtctgctcaagggctccctagctgcccagctctatctccaccacagataatctttgcctgctgaaaccttattcaaccttcaaggagcagcatgaatttggcttccagctggaacttctcctttgaggttcctgtagctaccccagagctatctctattttccttgccttgttttttacagcttgtgagagcccatttctcaggacctagaactgaagatatgtgccccatagcagtgcggagcctaccaggcattcagcaaaccccttagtgactaagagaggggtgaggtctttaggggttcagagctgaggttcagagttggagtggggaggtggcaaggcaagtctaggtttgaaaggtagcatgagagcgctgtggaacacataccccacaaatatgagctcaatgtgtgcggagtgtaccatatccaaaaaggcaggccctcaaccatggagtgcccctggtcagggagtgtctaaggggtaccatagacctgagcccaaaaggaagagatgccagaaacacatataagtgaaactataaaactcttagaagaaaacaggtgaaaatcttcatgaccttggattaggcaatgctttcttaagtatgaaattaaaagcacgaaaaaaaaaaataggtaagttggacttcatcaaaatttaaaacttggccagacacagtggctcatgcctgtgaacccaacactttgggaggctgaggcaggaggatcactttagcccaggagttcaagacgagcctgggcaatactgcaagactctgtctctacgaaaaattaaaaaacaggcctgtggtcccagctactctggaggctgaggtgggaagatcgcttgagcccaggggaggggtcgaggctgcagtgagccatgattgcaccactgcactccagcctgggtgacagagcaagaccctgtctgaaaagaacaaacaacagctgggtgcggtggctcacgcctgtaatcccagcactttgggaggctgaggcatgcagatcacaaggtcaagagattgagaccatcctggccaacatggtgaaaccccgtctctactaaaaatacaaaattagctgggtgtggtggtgtgcacctctagtcctagctactcgggaggctgaggcaggagaatcacctgaacccaggaggcggaggtcacggtgagccaggatcacgccactgtactccagcctggtgacagagtgagactcttctgtctcaaaaaaaaaaaaaaaaaaaaaggatatgaatcaaaggacactatccagagagtgaataaaaggaggacaacccacagaatgggagaaaatatttgtaaatcatttatctgataaaggactaatatccagaatatataaagaattcctacaatgaacaacaacaaccaccaaaaaaaccatgaaatccaactccaaaaatgggcaaaacacttgaataaacatttcttcaaagaagatatataactggctgataaggacatgaaaagatgctcaacatcactaggcattaggaaatgcaaatcaaaaccaaaccacagtgagataccacttcacatccgttagaatggctattcacaaacaaacaaagcaacacagaaaacaataaatattggtgaggatgcgaagttgaaattcttgtgtattgctggtgggaatataaaatggttccgtcactgtggaaaacaattgggtcattcctcaaaaagtcaacataggattaccatatgatccagcaattccactcctaggtatatacccaaaagtactgaaaacagggactctaacagagtacaccaatgttcacggcagcactattccactaaaaggtggaaacaggtcaagtgtccatcagtgaatggatgtggataaacaaactgtggtatgtacatacaatggaatatcaatcggccataaggaggaatgaattctaacatatgtgaaccttgaaaacattatgctcagtgaaaccagccagacacaaaagggcaaatattgtagggttccaattacatgaaatatctagactacgtatattcagagactgaaagtagaataggatagaggtaaccaggggctgcagggagggggagctaatgtttaatgattgctgagtctctcagataatgaaaaagttctggaaatagtggtgatggttacacaatattgcaaatgtacctaatgtcatggggtgtacacttaaagacagttaaaacagtaaattttacattatgtatatttcaccacatacacacccatgttgccaactttgcaatcctccctggtcctaaatgctgacttggccaagtgaacgaggaggctggaagtggggacaggaaactcatgacctcccagctcccagcccatccgcctcaggggctgggctcagcagattccaatgactaccaggggtcacacctgggaagggggtgagccgaggcccagggccagtcaggctgaccaggtgggacttagcctgctgcagaaggcagaaggtgccccagcagggggcacagtacagggcgggattgggacaggaaggacaccgctccccaggggacccagccctctcgcaggctgctggagtggactgatctggccatttatggaggcccaagggctcatctccagttctctaggaagccctaggcctcctcctcttctgggaagatgcacccccagcctccacaccaggttcttggccactggagaatgatatagctggggccctgggacctggacacctcaccgtgaagaaaagcagcctgctgggcacactgggggtcagatgtgtccctggccacaggggatgtcagggtcagctctgctatggccagggcagctatcttgtcccagctcccctgttcctcccatttggggtcctgaaaagggcaatcgtgaacctgatggaagaatggtggggttctggacacagcgaccctggaacagggcgcgggggaggaccctttccaggaccactcccatcacataatgtagaggccacctatgcttagcccggccctaaccccaaaggggtcagccccaccggaatccagcctattggctcagcctgtcaccacaaaggccagcttcagcccagataactgttctggaaacagaaagagcagggaccgctcagaaaggagatctctgtccctgtttgaaagcctggagttgaggggacagtgccccgccccccgccccccgcaacttgggttgcagctgtggcctagtgagcacgcagcgccccctggtggtcgagggggaattgcgggtcccgggaaagggggcggtgtgccagcaacagggagcaggcagctctgcagccctgaaccatccctcccttgggtgactcttttggaaatcattgttccccagacaggaggttcctgaggttcatacttgggtctccaagtcttgggtgctctgaagacaggattttaaatccccactcctactattggtatgtgttgcatcagggtggcttgagctggcctggtacacagtgggcactcacgtttgctgcctgtttgagaccaagtgcctcaggaggtcttggagggttggctggggccccaagtccctgacctctgattccagaggccaagtttagctggggaagaaagggcagaggcagtttccctatggacagctaggcccgggtgtaggattcagtttctgtttcctgacaccaaggcttctccccaacttccccattgggctagagaaggaagaacacagggtgacatggccagctggaggttactggcccacagatagggagtcagggtacggatgggcaattcctggagcagattatggtcaaaatagtggaaatccccaatcacaggccaaatgtttaattctcagagccatagaatccataactaatgcttattggctttgacatgggcagtagaaatttcacacttcattccttaatctggctctaaatgcttctggctggagtgctcactctccaaactgtgctggacagcaccagaagccctcctgtggacggacgaagtggtgatggatgaagtggaattgtgctggggttagagtaaggagagattatcgttgggctgggctggggctgaggtcagggtgatgatcaggttggaattctggaagcaaattaaggctgggattggggtggacattgaggttgagtgatgggtgggggtaagggtgaaggttggagttgggtgcaggtgatggttaagatacggtggaggctgggttgagatgaggatgatagagtcggagttgtggttagggttgggatgatggatggttgggattagatgagatgagtaaatggttagggttggggtgcaagtgaggtgagggtgagataaggttggaataggggctggggctggggctgaggtagggtcagagcagggtgatggtcgggactgggattgggatgcaggttggaaggatttgggggtggtggaagggtttcagttgagtccatctttgattagtgtcttggacttgggttggtttggggtccaccactcgcacccagatggagcccccccccgacccctgcccctatcccgctcagccagtttcagcccagccccgctcctaatgctccactcaccctctgggcccagggaccagggacaggggtacctgctccacagaaggaagtggctgcggcggtgctggacctgcggagaggagaacaggaaggacggccaagagctcctggtgcagctggctccccagggctctgccggctcaagagagaaggatcccgtatcaggggctgcttcctctttcccaaagcctcagctctactgtccaacccagaggctggtcagggaggcagctgcaggccttgcgcaatgccaaaacgggaaagacctccataggggaaggccctcggcaaggccagggacttagggactccagcaagcagaagtgggaccgctgcaacgctggagcctccccaggcaaagtgagaaatggagtgggggactcccattcaccagccaaatccacaccccactctctctgagccccttagggaggctgggggaggtggaagggggcttcctgcacacagctctcctccctgacacctgagagggaggcgcgcccagcctggggtggggatgcactacacgatgcccagaccaaggcagttattctccaagccattcaggagcctccctgtaccactgagtactcttaagaacccccaagaggcagtcccgtgttgtgggggacataaggccccaatgtccaggacactcctcaggttttctctttcccctctcactgtcctgtacgttttttggtttttggcttcttgttgttggtttttttctttttgttttgtttttgcttttgagatggagtctcactctgtcgtccaggctggagtgcggtggcacaatctcagctcacggcaacctccacctcccgagttcaagtgatcatcttgcctcagcctctcgagtagctgggattacaggcatgcaccaccacatccggctaatttttgtatttttggtagagacggggtttcaccatgttgtccaggttggtcttgaactcctgaccccaagtaatctgcctgcctcggcctcccaaagttctgggattacagaggtgagccgctgcacccggccactatcctataccttcacccccaccttgggacaggaaaggaaagcccccaccacagctagttactgttacattactgcagcccatcttattgagggcctagtttgtgcaggcacttgacatgtgaagcagatgttaattgctccaagcaatcccagatacaagcaacaagactttttttggtttttgtttgtttgtttgtttttgttttttgagacagtgtcttgctctgtcgcccaggctggggtgtcctggtgcaatcttggctcactttggctcactgcagcttcgaaattctaggcttaagcaatcctcctgcttcagcctcctaagaagccgggattacaggcgcttgccactatgcacggctaattttttaagttattttgtagagacggagtctccctatgttcccaggctggtctcaaacacctgggctcaagtgactctcccacctcgacctcccaaagtgctggaactacaggcgtaagccaccactcctggccatttttttttttaatttcacaactcaaacttaattcaactcagtccctgcctacctgtactggtggggagctggccacagcaaattaggcccctgtaccctgagggcaaggccacgtgtgcaggtgtaaaaggatgtgaaaccctaaatcagggtggatccagaatcgcaggccatggtgccccaaagcagatgtctggtgacattccaccctgaaatgctcaggctacagagatattaggtctctatcactctgttcctctttatagctcctgtgtccactcctatgcttgggccatttcctctttcggccaaaacacaaagggttcatcccattacttcctccctcaacagctggtccggagacacccagctctaggcctgtggggttgtgacacatgggtaccaatccttcagtccactgggactctatacatccaccccttggcttcatggtgggaaagcatcccttgactttgaccttagtcatatgacttgctctggccaatggatgtgcacggacatgacacaaactaagtcttgaaacgtacttaagcagtttgcctttccccctgaatttctgtcattgccatgcaaggggcaggctccaactaacctgctggtccaaagaggatgacgaacacatgcagatgacctgaatcagacccatggattgaaacaaaactcagctgagcccagcctacgtccaccagaccagtcaacctgtggatgcgtgaatttattgctggatgctgctgagaattttgtggctacattagcaagatgatacaaggcctaagtcccagaacaacacacccagaacttgcttacctttccttagcatgaggagagcaaagacttgtctaccttgattagtcagggagcactgcttcctgtcatttccttgagtatacagcaaactaggtaaataaataaaaataactaggtaggctgggcacggtggctcacgcctgtaatctcagcactttaggaggccgaggtgggcagatcgcttgaggccaggagttcaagaccagcctggtcaacgtggcgaaaccctgtctctacgaaaaatacaaaaattagctgggcctggtggcaggcgcctgtagtctcagctactcaggaggctgaggcacgagaatcgattgaacccgggaggtggagattgcagtgagccgagatcacactactgcactccagcctggatgacagagcgagactctgcctcaaaatattttaaaaaatgtaatttctcagtaggtcacactgttacacattcatctaataacaattattctttttcttttttttttttttttttggagatagggtctcactgtcacccaggctggacaggctggagtgcaatggcacaatctcggctcactgcaactttgacctcctaggctcaagtgatcctcctgcctcagcctcccaagttgctgggactacaggtgagtaccaccagacgcagccaatttttgtatttttttgtagagatggggcttcaccatgttgcccaggctggtctcacactcctgagagttcccagtcaagtgatccacccaccttggcctcccaaagtgctgggattacaggtatgagccaccatacccagtgaattattctcgttccagataggaaaaccaagtcatagggaggttagagaatttgccaaagacaaaactttttggttgaaaaaaaataagttttgctacaagtatagaaaacaccaaataacggtgttttaaataaaatagaagtgtttcaccctctccctcaagtaagtgttggcatccaagatgatatgacaactccacaatcatgaaactagatccctttttattttttggctcagtcattgtcaatgggctgcttccagtcattgtccaaagtggctgcttgcgctccagccactgtatctgcattcgggaaagcaggatggaggaaaggacaaagtaggccatgccctctactttaagataactccttaaattgctgatgtggtgggtcactcctgcaataccagccactcaggaggctgaagcaggaggttcacttgaacccaggagcttgaggctgcagtgaactataattgtgtcactgcattccagcctgagtgacagagtgagatcttgtctcttaacaacaacaaaaaaggtaattctttaaattgtacactttattgctgcttatattccactagaagctagaagttagtcacatggtcttaagtctttattctaacaggtgatgtgcccgagtgaatcctgggggcccagtgctaagaagtagagggagatgaagccctgccctcctgtggagcaaccaggaccttaattcagtcattcattccttggacctacccagattccagcctcaggcccctgcccacctccttgccagtatctctgcagagcctcctgcctcccccagagggtgccagagccctctgcttcctcagccttcagacccacttgctgtgtctcaggtggggacaactcagtctatagaggcccaagggagatctttgagacccatactgtagtcagcttggggcagatgggagtcatgtagctcactggctaaaagcctaggtcctgcatagagctgggttcaaatccaggcatatccatcacctgctctacgatcccaggagtcactcaatgactcagaagctagagtcctctggaaagcttgtatgaagagttcccagggcctggaacatcaaaagagctctgagaatgttggctctgctgttgcttctcttattgggtatctgaaggccgtactctcctctctcctccacccgaggtgacctctactctcatagccacaccctggaccctcactcattcagtcacctcacccagtctgtcatctgtccctctggctctcctctcctgttcatgcatcttgtactcacccacttctgtccctgagtgtttcaaggctctggggttttcagagacactgaagggacctccctcctcaacacaaccacaaggtctaggtggaatgacccactaagggaccggctctgaagccagagacttccagggaaagtcaacaagcccaaggatgcccgttacaagaaagttaaaagacccatgtacatgtcctcccgttttattccctgctcagggtctgggcatacagtggaacacatgcagtccccaaaggacaccgtctgtacagagtcagatggagttaagaacatttagccggctgggcgcggtggctcacgcctgtagtcccagctactcgggaggctgaggcaggagaatggcgtgaacccgggaggcggagcttgcagtgagccgagatcgcgccgctgcactccagcctgggccacagagacagactctgtctcaaaaaaaaaaaaaaagaatatttagtctgggcacggaagcttatgcctgtaatcccagcactttgggaggctgaggtgggcggataacctgaggtcagaagtttgagaccagcctggccaacatggtgaaaccccatctctactaaaaatacaaaaattagccaggcatctgtaatcccagctactcaggaggctgaggcaggaaaatcacttgaacccaggaggtggcggtcacagtgagccaagattgtgccagtgcactccagcctgggtgacagagcaagactccatctaaacacacacacgcacacgcacacatatttaaaccaccacaccaacatctagttcaagatggtggactgagaacttgtctctgccattcctggcccatccaataccactgagagcacagtaagcaaagggaaaaggagacagaagggctgggaacaggatggctgggggatgggaagtatccactgcacaggattttgatttaattctagaagatagaaagagggaggatcacgttcaggaacagatgcgggtaaaggaaaccagagccaaagcacgctgagagaaagctgccccagaggccggagcagaagtggactctctacagggactcaatacaccccaaagggttggtagctggcacacgtacctctccacccccacatgtaacactgcagggcagaggaaataccctaggtgagttccagtatcaatcaacctgccctttgttcataaagatgaattggttaccaggtattaccagacaggtgaggaagaccaacacaaagagaaagatccagaaacaaacaggccaggcgcattggctcacgcctgtaatcccagcactctgggaggccaagatgggtggatcacctgaggtcaggagttcaagaccagccttgccaacatggtgaaaccctgtctctactaaaaatacaaaaattagctgggtgtggtggggttctcctgcctcagcctcccgagtagctgggaggctgaagtaggaggttcacttgaacccaggagctcgaggctgcattgaactatgattatgtcactacattccagcctgagtgacagagtgagatcttgtctcttaacaacaacaaaaaaggtaattctttaaattgcacactacattgctgcttatattccactggctagaggttagtcacatggtctcatgtctttattctaacaggtgatgtgcccgagtaaatcctggggccccagtgctaagaagtagggggagatgaagccctgccctcctgcttgaaccctagaggtagaggttgcagagagcggagatcatgccactgcactccagcctgggtgacagagtgagactccatctcaaaaaataaaaaataaataaataaataaataaataaataaataaaaacctacagcaaagaacaaagagctattgcaccgttactgtgggcctggcagtattatgacaacttttttttttttttttttttttggagatggagtatttttctgtcacccaggctggagtgcagtggctcaatctcagctcactgcaacctctgcctcctgggttcaagcgattctcctgcttcagactcccgagtacctggtattataggcacatcccaccacacccggctaatttttgtatttttagtagagaccgggttacaacatggtttcaccatgttggccagtctagtatcaaactcctgacctcaggtgatccacccgcctcagcctcccaaagtgccaggattacaggcatgagccaccacacccatccagtgttctgacaattttatacttattaactcatttagcaaccctctgagctagatgctattgttatctccacttacaggaaactgagtcacagaatggtacagtaaaataaccttgaccgaggtttacatggctggtaagtggcagagaaatgaaacttgaacccaggcaacctgtttcctgagttggactctgaactactcagccatactgcctatttatttatttatttatttacttacttacttatttattgagatggggtcagccgggcatggtggcttacgcctgtaatcccaccactttgggaggctgaggggaacagatcacttgaggccagcagttcgagaccagcctggacaacaaggagacagggtctcgctctgtcacccaggctggagtgcaatggtgcaatcatggttcactgcagcttcgacctcccaggctcaagcgatcctcccacctcagcctcccaagtagctgggaccataggcacccactatcatgtccagctaatcgaaaaaaaaaaattatatagagatgggggtctcactatattgcctagactggtctctaactcctgggcttaagcaatccacccaccttgccctcccaaagtactagaattacaggtgtgagccaccgtgcctgaccaatacttcctctttaataaactaaacaaaaagtgaacaaaccaatcccggagggaacagataattcaaggaatacaagaaaacttatgaaaagaaagattctagtgccaatatgttcataaaacaaaaaaaaagcagctatgaaaagaaagcaaaaaataattcttggaaatttaaaatagaattgctgaaataaaaagaaattcaatagaaaagggtgtgaacatctgtggttttggtttccaaaattagttcactcttctttgggtaaaaataccctgattttcctgctgtattctcaagccctgtgggttggtggaattgacacctcttccatttactgcacgagagaagcatgttgctgctcacagttcattatgaggagccagcaggtaaagacaacactgagggcagatgaaagatatatactgaccctgggtccttgtggacatcattgagtccctggatcaagccttacctgaagctaaagggatgagtgcttctcactgttaatagccactgatcaaattccatagaaggactccaattatccttgcctcagttgtgtgtccagccctcggatgagctaccatcaagggaaactgccagaccttggtgacaagcccacccactgaaaatggggaaaaaacccaagtcacatcattgaactgaaagagctgcagttccccgaaagacaggagagaaggaatgctggataaacacaacaactacttcatctcactgcacctgcaaagaatccaggcacaggaaggtgggcacagcaagtagtctttctggttgacataacaaagacaacatctgtttcttctctcagaaagaagtaagaaaggcaattggagaaccagaaacgacaaaatctattccaggaccaaatagaaagaaaacacatctgaagcatgattttgaacaattagtggggtgtaagaaaagagaatccatttgaccttgacatctgaaacagcaaatattctccatcaaggcactttagggtagaggaaatgatactatgtttccttctcaaaggagctatctggttacgtggttctgcagtaaatgacgtttatacaatcataacatccgttggttttcaattttcagaatcaacctgaagataaagcatggaagatttcattataattaccgaacagcatgcaaatgttacaaactttgaccatgaaaatgtaaaaaagagcccaggcgcagtggctcacgcctgtaatcctagcactttcggaggccgaggcgggtggatcacaaggtcaggagtttgagaccagcttggccaacatagtgaaaccccatctctactaaaaatacaaacattagctaggcatggtggcacgcacctgtagtcccagctacatgggaggctgaggcaggagaatcacttgaacccaggaggcggagtttgtggtgagccaagatcacgccgcggcactacagcctggtcaacagagcaagactccatctcaaaaaaaagaaaagaaaagaaaagaaaagtagacagcagaaattagagggagatggcaggtgacctggggctgggggaggcacaatttttcttacatagtgatagggctcaagaaattctttctaaaattgatgtatgaggaacgaaattttaaatatagattgtttagaactataagtagcaccaacacaggactccagtaatcacacagcaaacaaaactgagaaaacagacatgggcggggagatgggaatgggtgatttccattccctgctttaatgatgaggtgtcagtagatgctctcttgagttactaaattgagaaacaaagataaagtatattgtttagaggagtgatgttcaaactccagaaaaggctgggcgcggtggctcatacctgtaatcctggcactttgggaggccgaggtgggcagatcacttaagcccaggagtttgagaccagcctaggcaacatgatgaagccctatctctactaaaaaaaaaaaaaatacaaaaaattagcaaagcatggtggtgcacacctgtagtcccagttattcaggatctcactactgtactccagcctgggtaatgagagtgagaccctctctcaaaaaaaaaaaaaaaaaaagaagaagaagaagaaaactccagaatatataaaaatgaaaagagggcggaagagtggaactgcggggtagaaaattttgcattttgtttcatctctctgtatatgttgaactttttttttaacctacatgtactacgtcatatccacagcccccaaccatccaccaggcatcaactgctgtgtttatatggagggttgagcaatcattcctgcctccttccagttcgtcttcctgtactgcagaggctagaaaactaaatttatatcacccagattcccttccagctaccttaatgctaccacctcattcagccatcattgattctccacttcaccaaactggtcaataattgtctcttctaaaaatattagaattgggactaagagacactacagctgacccttaaacaacatgggtttgaactgtgctagtctgcttatacacagatttttaaaaaaataaacatattgaaaaaaattttggagagatgtgacaatttgaaaaaactcacaaaccacatagctagaaatatcaaaaaaaaaaaaactgaaacagagttaggtaggtcaggaatgcataaatatatatgttaattggctgtttatattattagtagggcttccagtcaacagaaggctattagtaattaagtatttgagtcaaaagttatacacagatttttgatgatgaggaggattagtgcccccaacccccatgttgttcaagggttagctatatttgaaatctgctggtagctggaattgggcaactaaattcacgagatgtggaacggtcgtatacatggagaataaataaataaataaataaataaataagtatttgttggcctggtgcagtggctcatacctgtaatcccaacactttgggaggccaaggcaggcagatgacttgaggtcaggagttcgagaccagcctggccaacatggtgaaataccgtctctactaaaaatacaaaaatcagctgggcgtggtggtgtgcacctgtaatcccagctgcttgggaggctgagggatgagaattgcttgaacctgggagtcagaggttgcagtgagccgagattgcaccactgcactccagcctgggcgaaagagtgggactctgtctcaacaacaacaacaaaaaagcaattgttaaaagaataagaaaacaagccacagattgggagaatatatttgcaaaacaaatatctgatgacccaaaatacacaaagaactcttaaaacccaacactaagaaatcaaacaaccccattaaaaaatggacaaacgggccaggcatggtggcggtggctcacatctgtaatgccagcactttgggaggccgagcagggcagatcaccttaggtcaggagttctcaactagcctggccaacatagtgaaaccgtctctactgaaaatacaaaaattagccgaccgtggtgacgtgcatctgtggtcccagctacttgggtgtctgcggcaggaaaatagcttgaaccagggaggttgcaatgagctaagatcgcgccactgcactccagcctgggcaacacagtgagactccgtctcaaaaaaaaaaaatgggcaaaagatgtgaacagacacctcatcaaagaagatatacagatggaagataagcatatgaaaatatgcttaacctgatgtcattaaggaattacaaattgaagcaacaaggtaccactaaacccctattaaaatggtcaaaatccagaatgctaaaaacaccaaatgctggtgaggatgtggagtgacaggactctcattcgttgctggtggaaatgtaaaatggtatggccatttttaagacagtttggcagtttcttacaaaactaaacatagtcttaccatacaatctaacaattacactcctagatagttacccaattgaggtgaaaacttatatccagggccgagcacagtggctcacacctgtaatcccatcactttgggaggccaaagaggaaggattgcttgaggccaggagttctttctttttatttatttatttatttattttcttttgagacagagtttcgctctgtcacccaggctggagtgcagtggagtgatctcatctcactgcaatctctgcctcccggcttcaagcgattctcctgtctcggcctctgagtagctgctgggattacaggtgcacgccaccatgcccagctaatttttatatttttagtagagacagggtttcaccatgtcagctagactggtcttgaactcctgacctcaagtgacctgcctgcctcggtctcccaaagtgctgggattacaggtgtgagctactgtgctcagccaaggccaggagttccagaccagtcctggcaacacagtgatactctgtctctacaaaaaaaaatttttttaattagtcacatgtggtggcacacacttgtagtgtcagctactggggaggctgaggctgaggatcacttgagccccaggagtttgaggttgcagtgagccacgattatgcctctgcactccagcgtgggcaacagagtaagagaaagaaagagagagagagagagagagagaggaaggaaggaaggaaggagaaaagaaacgaaaagaaaagaaggaaggaagggaaggaagggagggaaggaagggaggaaggaaggaagaaagaaagaaaggaaagaaataaaaaaggaaaagaaaagagagagagaaaccttatatccatacaaaaccctgcgcaagaatgtttatagctgctttattcataattgccaaaaactggaagcaactaagaagctctccaatgggtgaaaggataaacaaactgtggtatatctgtgcaatggagtatcattaagtaataaaaagaagacttagcaaaccacaaaaagtaatatgcatactaaatatgcatttagtaatattaatatgcattaagcaataaaaaaagacgtgtcaagccacaaaaagtaatatccatattactaaatgaaagaagccagtctgaaaaggctacgtgctgtgtgatttcaactatttgactttctggaaaaggcaaaactacagacagtaaaaagatcaagggttgccgggggttctggggacaggaaaggatgaataggtggagcacgggaattttaggtcagtgatattattctatatgatactataatggtggatccatgatatgcttttgtcaaaacccatagaaagtacaacacaaagagtgattcttaatgtaaactatgtgctttagtcaacaatgtattgatattagttcattaattttaacaatgtaccacactaatccaagatgttaataatggggaaactgcgtgtgagggaggggatacatgggaactctgtactacagctcaataattttataaatctaaaactttttttttaaataaagtctcttagaaaacaataaaaataaaataaaaagtcaattttttttttttttttgagagggaatcttgctctgtcacccaggctggagtgcagtggcacaatctctgctcactgcaacctctgcctccttagttcaagcgattctcctgcctctacctcccaggttcaatcaattctcccacctcagcctcccaagtagctgggactacaggcatgcgccaccacgcctggctaatgtttgtatttttagtagagatggggtttcgccatgttggccaggctggtcaagaactcctgacctcaggtgatccgcccgcctcagcctttcaaagtgctgggattacagggttgaaccacatgcctggtctaaaatgtccatttttaaaaggcagtctggctggggcagtggctcacgcctgtaatcccagcaccatgggagaaggctgagcagggtgtatctcttgagcccaggagttcgaggctgtagtgtgctatgatggtgccactgcactccagcctgggtgacagagtgagactctgtctctaaaataaataaataaaaatacaataaaattttaaaaggcaatctgcagcaagagaagatgaagttagcaggagagcaggacagaggagagtccatgaacaacagggagaggaaagtggtcatggtggcagctcccaggctcctggcatatgttcaattccctgttcccagccctcaggaagcccagatgtccccacctgcccctacatacaaaccctggatccttgacatcaacttctcctttccttcatgtgctctaatgagtttttgttacttgtggaacatttaactaacatcattaaccaagtggacctgtctcagagtggtgttatgagaagacagcagccaaaagacagctgcagccaagcacagtggctcatgcctgtaatcctagcattttgggaggccgaggtgggtggatcacctgaggtcaggagttcgagaccagcatggccaacatggcgaaaccccctctccactaaaaatataaaaattagccgggtgtggtggcgagcgcctataatcccagctacttgggaggttgaggcaggagaattgcttgaacccagggggcagaggtggcagtgagccgggatcatgccacttcactccagcctgggtgaaagagcaaaactctgtctcaaaaaaaaaaaaaaaaaaagacagctgcaacaaatgtcaagttctgtgtgttttcttttcttttcttttttttctatttaattaatttattttagagtcagagcctccctatgtcacccaggctggagtgcagtggcacagtcacagctcactgtagcctcaacctcctgggctcaggcgatccttccacctcagcctccttcctagctgggactacaggtgtgtgccacgacatctggcttgtgtgttttcttttctttttttttgagacggagtcttgctctgccacccaggctggagtgcagtggcgcgatcttggctcactgcaacctctgcctcctgggctcaagcaattctcctgcctccgcctcctgagtagctgggaatacaggcgcacaccaccatgcccagctaatttttgtatttttagtagagacggggtttcaccatgttggccaggatggtctcgatctcctgaccttgtgatccacctgactcggcatcccaaagtgctgggattacaggcgtgagccactgcaccctgcctggcttgcatgttttctgacatactgtcaaaaggatactcatactaaatggcaacacattctcaagccccttccttttcttctcctatctgctttaccacacaccatagctgcttttaccgttttctccttaaaaactcaaaaaaaccttcccccaacctatctatccacttcttgtcctcccctcaaacccactccattttgattctgcatcataaaaaccaagcagagttctggggaggcagaagcctcctcttatgatattggaagggggtggatgaaattgagcacacaaagccagaatcctcttttgtggaaagatgggggcagtgggcagagggaagcaggctcatctctttccctctcttcccttcccttctctttcacaccacacgctccgcctgggtgagctcatcgtcctcgtgtcttcaatttccacctccaggagatcgactgccaaatttctacccgcaatcccaaactccactctgagctccagacccatctactaattgcctagtcaacattttctctgtgggatcgaatcagataggattatattctgctgtgactaacagagactgaaaattcagagtcctaaacaaaagactttctttttcttgtgctgaaaagtctggaagtacacagccctaggctggaatagggatactgctggggggctccgcctccttgcaggctgcccctctgctatctccagggtgtgtccctcaaccacactgtccaaagtggtgactgaaggaccagtcctcccactgacattccaggcaacagaatggagaagaacaggctgaggaaggaggaaccacaggcgccctccagctgtttcaaggaaggttcctggaagatgctaaataacaattccgtttatatctcattagccaggcttagtcacgtggcaacacctagaagcaagaaaggctgggaaatatactgtttctgctgggttaccgtatgcatgactaaaaagagagcgctctgttcttaggaaaatgagaatagactgggttgggggaggataaccagcattggctacactgcagccccacaacctcctcatgcttgatgtggctgaaataaaaagagcatctccccctaacatttcctttcccttagtcttgttccttttctgtaccccataccctagcagaggggcaattctgtggggtgggctcactggcaaggggaggtctcacccaagctcagtcaagggtgagcagagagaattgtacaaggaagctgaatttccagctggtctggaggaaacactgaaaaccccaaacagaagatgtccaggtggagcaaatgcagctgagagttcttgtccaaggggacagaatgtcagcagagtaggacacaagggcaggtctctactgaaagcaccaggggcaaagtcacccagcccttcaaccggctggccaccaagcacatcggctccactctgcctcctgcccgtgccaccctttgcacttttgtctgtaccatctcctccaccaggagtgcccttcccgctcctccatgtggtatactctcagccacccctcaggctcagatccagagccacctcctccaagaagtctccacctgtctgctgggaaccctcacatcacactgggagacgaagccaaaagtgggggggtcagtacagaggtgtgggaggtaggtccaatcctggctggacctggctttgggtgccatttgggacagggtattggggaggttcagcaggaaggtgggacctcaaggctttctttttatgaaggaggaggaaccagctgttgacagagcagcaacagcagggagccaccaaggctgagccttgaaccctgggccaccaggctcctgcaggcaactgggagcagctcagcctctcacagtcccatttccagggaggaagatgatgcagcctgaggcaattggccacctggaggaagttcagctgggtggggcaggcagaggaattcctggaaggaagctcacccctcagcactggggtagagggacactagagacaggggtggcccaggagctgcccacctcctatccccatgaataagcaggtgggcccgggtgaccagctgggagccacccctgggtgctcaggtaccatgcttctggcccagcctcctgagctgtggcacaggcaagagcaccggcccacggggtctgcatggggcagtgacctgttctctctaagcttcagctttctcatctgtagaaagagggtgaagagtccttccccaccatggttgtggtgagggtaactgaagtgtcagggtaggggacccagtggggcaccagcacacctgaggttcagtcaacaaggcccactggtgaagaaaacctcgcccaccctcccgtccctcctgaggcaggtggtggaggcacatgccctctccattgtgtgtgcatgagtgtgtgggtgcatgcatgtgtgtgcatgcaagtgtgtgtgcatgtgtgtgcatgcatgtgtgtgcgaatgtgtgtgtgtgcgcacatgcatgtgtgctaagctctggagaacaagcagccaggcttgggcaggagtccgggggcaagggggggacatgcaaagttctctccacagcccctcagtgctaacaggctgaggtgggggatgacatgtcttagaaacaaacttcaccctctgccctaaaactgcctgctggtctgccacatcgggccaagctgtgggtacttggaaagagggccctgctcctgccttccaaacccaggaagtcttgaaatccccatggaggggacctggggccaggggactccccaagcagacacagcacccacacaagggtctaagggacccctttctccccaaccgcctgaggtagggatggatgtggacaagcagctcagggctggggctggcctaggtggaaggttcagaagcacagaaggcaggacgtgcccaaggggctggacatggggttggaggctaggggctggaaaaagagtttgggaggtcagccaagggcagtccacgccttggctcttctctgggtcatggggagccacggagagtataggagtggtgatgggatggccccagagttgtgcctttgaaagtcacctctggttgcagatagagatggactgggggcagggctgagaggaagggcatctcatgagaggggaaatccctgaccacagtccagaggaaaacagcgggcctggggagaggctgctcctggggaggacctactcagaggctgattcttcctcgtgctaccccacccagggagatgcaggaagctggtgaggtcagtgggtgggcccacaaccatgctggagaggagcaggagggagacgggagggcacagagaggtagagggcagggactctgaggaccctcatccatgcccacctggacaattgaatcgagcttcctctagtgtggaatgtgggctcactggggctatttgctatccttctctcatgtcagactggatgcggcccaagggtggggtctgtgactccctcatcagactgaggggggccgaaatgtgggggtgggggaaggagggagcttccaaacaggaaggtttggagggcgctggcactgaggacaggggatacgccccccatgagtcttcacccctgctcagagcctgctgccgtggccctcagagacgagcccatctttggagctggagttggggacagggaaaccaggtggaagggaaaaagaaaaaaggggcaggcatgagtgtgaggggccagaccctgcagaccccaggacatgcacagcagacacacactccaatccctcctggctctgctcagcctcaaacgaggtgcaggcctgcaggccccaaccaaggacccctgttacacacagacacaaagacacaagatgcagcaacacacacacgtaatacagaaacacagtcacacactagcgcacacacagacacagtcagacaatccaagaaacacactcacacatgaacagacatataagcaaagtcttacacatacaaagacacacttaagcacagacacaaacacaccaacagatgcacagacggacacacatagacgcacactgggaggcggcctgtggagactgctgattggataccatgttggcttggtatccagaattgttggtgcagcgcactcaccatgcctgacctcattaaggaggccctctggggcagtggctctgagaagaaaggcagcaagcctagggaggtgacactgtagctggggagcattttggctgggcagagaggaggaaggagagcatttcagggagggaaaatagcccttgcaaaggtttggagtggaagagcaaaagggatgtcccaagaactgtgcctcatttgatggggctgtggggcccttctctgacgggcagccttcccaggcacaaagggaggtggactgagaagcatctggaacttctgtgggggcacatggggcagaggggaaggggaacaggcagaacgagtcagctgcctttgaaagctccacgagggacctagcagaaattcattcattcatccgttcattcatttatttatgacaggttctctctctgtcacccaagctggagtgcggtggtgtgatcacacttactgcagcctcaaactcttgggctcaagcaatcctccaccccagcctcctgagtacctaggactacagacgtgagctactacacctggctaatttttaaaactttttagagacagggtctccctttgttgcccaggctggtctttgttgcccagccagcttcaagccatcctcccacctcagactcccaaagcgctggattacaggcatgagccacgggttcccagcccagaaagagaccttcaccccacaaaccccctgtctggaggccaagtcccagcatccccagaagggccccggttaggacaagaaaaaggctgtgtgcctcggaggagaggctgggtgccccctggtgcggagtggtccccttgccgggcatggggcctcagtctgtgagactccgcgcctccgtcgtctgaacttgagcaaagacagagctaggcctagcctggggacccgagggcctgccctcatccgcaattctgcctcttttctggccactgaggaccgggctagggaagctgtaggggcagtaggggtgggaggagagagggttccgggtcaagggactggaggggtctggggcagggaagtggaggggtctagggcgggcccttccccctccgctgttgggccctcgctgaaggggccgaggctgagccccaaggtgggcctgtgggggcggggcgggggagcccctcagcagctggaccgcaggaggccgaccagggtctggaactcctcttcccctccctccgccgccccctctcccttctcccaccccctgggctgctaggggagcgggggaggcgcaggaggggctcagggaggggccctggacgcgggaccaggctgggcccctcggcggaggcccgcgcaggcaggccccgccccggcctcgcacatctgggccgggagcgcgggccgacccggcggcgcaggcggcgcggccatccggcctgggggagggggcggcgggcggggtgggcggcgcgaggaggcgggaggcctcagggccgggcgcacgtcgagggctgcggccgccgcagcgggcacggccaacgagctgcgggcccgggatcgcggcggctggacggggctggagctgtcgggagggcggaggtgagttctggggcgggggctgccgggcgccccgagtggagaaaggcgaggaggtttgccgtcccgggctgtcggctgagaccccaccaaaaacctccagactttgtctggtggggacagatctgcaagcccctctctgcagcgtggctgcgggctcgggaaggcacttggggcagcgaccttggtctcccacctgggcttcgggggaccacctcccctgtccctcgcacagctgctcagaggcttaggctggagaaactcctgtgtcttaggggctggcaggactggtgtgggctggggcctgctccagggagccaaactgagggacccggtgcctaggtctgaggtggaaacctgggagttgagtgtatgtgtgtgtgttggggggtgcctcaggggtcccaggccctgtggtcccgaagcgcaacagagtactgagtggcccaggtgccagggtctgaggctgggacctggtcttccgggccagcttgaggtccaggtggggtggggtccaggttcccgctagggcagtggagcctatctgtgaggttagcgtgtgttgatgagagagactggaagggagtgatcacgaaactagggaccctccggagagcagacgcagcgcaggaatcccaggccagaggggtaatggggggctgtgggcagagcatgggaggggctctgttgtttgtgaactggctgctcccatgatgaggacccaagggggtgcggcaggatgtatggaaagcaaagatgaggacagggaggggccatgggaggccatttctgtcactccctgccccagcgcaggatggggcagccacctcactcagccacacatggtcccatcttcttaagggctcctctccagaacagagtggggcagccctttgggtgccgtttctgatctgtgctttgggccctggttggcccagtctgtggcttggaagaaacgcctgtggcctcacttagcccgctgacggagtcctgttccattacagggctggctgggtgctgagcagagagcagcaggcggaagaggcagggtcctagtgaggaggggagctggaatgacctgggtgggctctttgtctacacaggcatcgtgtggagccctgaaacccagaacactgcattcccatagtgctcctggggacatgagcgcccagctgaaacaccccacacaggaagagatcctccgaggattctgtcaggcaaagggttgggcccctgcaaggtggctcacgcctgtaatcccagcactttgggaggatgaagtgggaggatcgcttgaggccaggtggtcgaggctgcagtgagccgtgatcgtgccactgcactccagcctaggcaacagagcaagaccctgtctcaaaaaaaggagcgggagtgggggcagggttcgtcctaggctattgtaagaccaggggatactctgggatgggagtctctggttgtgagttcctgctgggccacaccctatcctggtccccagtgactaatcggccctgcctattgggtagaagtcagggccaggggtcagggtgaagctgatgactagaggtcaatatgaagccaagagttaggggtcagtccatgggcagggttagggatcaggctggggccagagtttggcatgtgcttgtagccaggaaatggagttcctttctgtgtaaatcaaactgtcccactcaattactctcaaacccataggcaccaccagtctgaaattagtaggcccctgaagcggggctcagcctcccctcattttcagctgtggactctgcccagacctagctttcgggagctgggcttgtcccgtgttctgtggtcagcactctccttaagtgtccctgggtgtgtgtgctcgcttggcagtcagccacctcttggcttacctccacctctcggggaatccgtgggatcctccttctttaacacaatttttttttttttttttttggagacagggtctcactctgtcacccaggctggagtgcagtggtgtgatcatgacttactgcagcctcaaccttccgggctcaagcaattctcccacctcagcgtccaaagtggctgggactctaggcatgcactaccacgctgggctaatatttgtatttttcgtagagatggggttttgctgttgcccaggctggtctcgaactcctgagctcaagcaatccacccactttgacctcccaaagtgctagaattacaggcatgagccaccacacccagcccttaacacagattgatttagttcctacctccttccttaaagaactcatgatgactagaatgcgattctcagtaagaccaaaatatctaacaagaaaattcagaatctgcatcatgaagggaaagaacactgctcaaacctgcccaactccctgcttttatcaataccttgcatatctggacttgttaacataagccctctgtgtcacccattctacaggaaagggcactgaggcacagagatgtggcatgatgcactcacgctaggtgccataataggctcttgccatccctgaaaccccagcataggggcactcagcatatcgcacaatgagagacggtagataactggacaagcttccgatagctgggaagagtataggcccatggtttggatgtggaatccagtgtagagcgaggactcagtcttttttttttttttttcttgagatggggtctcactcttctcgcccaggctggagtgcaatggcgcgatcttggctcactgcaacctctgcttcccaggttcaaacgattctcctgcctcagcctcctgagtagctggaattacaggcgtctgccactacgcttggctaatttttgtatttttagtagagacaaggtttcaccatgttggccaggctggtctcgaattcctgacctcaggtgatccacctgcctcagcctctgaaagtgctgggattacaggagtgagccacggcgcccggcccagagtcttttttttctggtggttctaggttgtttctcctccagatacaatagcctcggtccagaaaatccattcattcattcaacaaagtggttccccagtgcttagcacagagcctggcatgaagaatctcgataagtgtttgctgaagaatcagaacaacatacaaataaggctgccagctcctccctcgagaccttgatccagtagtatgctggttaatggtttccaatcagctctggaagaaggataaaatcctgatttatggtgtttgccaatttctgtcttgtaaatactcccagccatgactgatttgaagctaccaatgtgatgtcattgaatgcagaattgggaagagatagaaagaatcagctcgcatgagctggtgggacccagctcagcatcccactccatcatcctgagctgggctctgggctcctgcccctggctcctaagaaccctcccctccccctctctgtgctttcccttttctcctcaacagccagctgctatatgcatgcccacaaccagcacccatccttcttctgattctgattcctgagcatccaactccaatggtacagaggacagcaagagtgtctggaaatctccatggtgctggccatgcaggagaatcctggacatacaagagtgtgtgggagtccaggtgtctgtccacaatggggctggtttgtgtgaactgtgtgagcaagggtgtgtgcatgtgtctatgggcatgccagagccagctctgtgtctgcctgtgttctatagcaaaactttcagattgggccgctggtgacagagaaggaatgcattggccctgcgtagcctcctcctttgtttagaggagcagccaggcccaccaatgagaacatagtgtcagtggtctgcagactggctgagagacactgttgagcaacacttctcaaacttcaatgtgcacctgaatcacctgggaatcttgttaaaataggccagacgcggtggcttacgcctgtaatcccagcactttgggaggctgagacgggcggatcacctgaggccaggagttcgagaccagcctggccaatatggtgaaaccccgactctactaaaaatacaaaaattagccaggcatttttaggtggcattttaggcaaattaggtggcgcatgcctgtggccccagctacttgggaggctgaggcaggataatcacttgaacccaggagatggagattgcagtgagctgagaactgagatcacgccactgcactccagcctgggggacagagtgagactctgcctcaaaaataaataaataaataaataaataaataaataaataaataaataaatatgaaatacatgttctgattcagcaggtctgggctggggcctgaggttctgcatttctaacaagcttccaggtgataccaatgctgctgatcctcagcccacactttgagtaacaaagctgttgatggtttgaaatatcctgcctatagcctggccccagaacttcatagacaggatcgagcccctcccatcttagaaaataaatattcttcctcacctcccttcagctttagcgccctccaactactgccctcacatgtattcctgatttcagccaagcttttcagaaattctagctcaatatgattgcgtcactacactccagcctgggcaacagagtgaaactccatcttaagaaaagaagttctagctcatgtcacctcttgctcactcctcacctaagcttacctcccttgggccactaaaacagtgtttccagtctcatctggggaccttttacagggatctagctttacccatctcttggtacaatcttcatgagaccatgaggcatctcagtctcctgggccggtatatattcctctgttcagcctttaaatgtaggttctcctcgtgacagagtgacaccctatctcaaaacaaacaaacaacgaaggccaggcacggtggctcatgcctgtaatcccagcactttgagaggccgaggtgggcggatcacctgaggtcaggagttcgagaacagcctggccaacacggcgaaaccccgtctctactaaaaatacaaaaattagctgggcatggaggcactcacctgtaatcccagctactgaggaggctgaggtaggagaatggcttgaacctgggaggcagaggttgcagtgagccaagatcgtgccactgcattccagcctgggcaacagagtgagaccctgtctcagaaaaaagaaaagacaaattgagtcatgcccccaccccaccctgccacctcaaacctttcaagatttgctgttgcccttcatataaaatcaaatctgaaatagggtgcacaggccctgcctgcagggtaagcccagcccagccctctgtccagacttaccatgtcctcttcccaccccgcattatccaactttgaccttcctagcactcagcaacgcttgtcatttcaaaatcacttgcctgattatctcctccatcagaccgttggtttctagggcagggacagtgtctctctgggtcactatctcccagcacctggcacagagcaggcaccagaaaacatttaggaggatcctgattccaagaaagtaaagccattttttgacacaagctgggaactgtgggactttagatgagatttaaggaattactgttaatttcattagacatgagaatggtgttgcgatgacattgtttaaaacgtctttatctgttggagagatgtattaaagagttcacgggtgaaacaacatgatggctgggatttgcttcaaaggactccagccaaaagtaaacaaataaaataaataagcattcagatgagggaacaaagggacaaataaatcccactctgcttgtctgttcctgttgacagctacagggcctgcaaggatgttggctgtcccggagatgggcctgcaggggctgtacatcggtaagaacccccaccattctgccctgacccatcacccactcacccgagcaggcactgagacccacctacaggttgtgcaatgtacctctcccacagagcttcccaacagctcttctgtgagtgagtgtgtgtgtgtgtgtgcatgtgtgcagggcaggtctgtgtttactggacccccctgtgtgtgcagaaagggtctgtgtgcaccggtctgtgtatgtgagtatgtgtgcacacaggactggtctattcacaggaccctcatgtgtatatgagtgtgggctgagtgcgtgtgtttgtgtgtgccagaagggtctgtgcacacaggagtgtatgcatgtgcgtgtgttttgttcaggctctgtccacaggaccctgtgtgagtgtgtcagtgagtgtgtgtctctgcgggcaggtctctgtgcacgggatctgtgtacgggagtatagtctgcaggtgggcatgcatacagagagttctgcgtgtgcatggagggtctgtgtgcacaggagtgtttgaatgtccatgtgttttgttcaggccatgtgcacaggaccccgtgtgagtgcatcagtgagtgtgtgtctctgcgggcaggtctctgtgcacaggatctgtgtacgggagtatagtctgcaggtgggcacgcatgcagagagttctgcgtgtgcatgtgcgtctggccatagcctggtctgggagcaggcttgggttctccgcaggggtgggaggccggaggcaagagggacactcctcaggaagtccattcacaaagacctggtgggctgggcccttccttcctgcctcccttcccaagctcgagccacagcaacttggcctctcgggctgcagctggtggcagggctggagcctgccctggctgcctgaggagagggagcccttgaaatgtggccactttttccctgcccctccagcacctcagactctggccctgtccaggcgcttcccagagtccccctcatgcctggcccttcgcctgtgttcccaggttacccccaaggccagggagagtggagacctgcctggcagcacgtgacaggactgtggctgagggagcacagggcctgcctggctcagcctaaggcgagccagacctgcctgatttgtccatggagcttcctaccagatctcactctccctccctagccagcctccctggcctgtccatggatatcaaggctgccccagtactcctcacatgccccttagcaatgcccagtgtggtggtggcagctaccagccaggcaggccctcctgccccataagccgcctgatcctcggggcgaggcctggggctgtcctccagggctactccactccctcccaccaaaggtccagctcagtcccaggcgtgcaagagggtcttgatggggcgtcctgccctgaaatgctggctcagggtgtgtgtatgtgtgtgtgtggggggtgggaatcagacttcctaatgttgtggacacccccagttcaggactgggctatctctatgggtgtgggaggaggtgctccccctcctcgatcctcctcaagcagccagctgggcctgtctgtggcccttgtgggcatgggagctgcagagttccctcaagtcctgattagaaccacgtggcccaactttagggtggaggggagcaaccccacctcctagccagttagctctgtagctccaccttttgaaggaggagggcttctctctcctctactccctcccaggagctcacctgccctatctcccctgcccttccatctctggactgagtctccctgccacacaatgcttttctgtctctctcccctcccacactgtgtgtctgaggggccctagtggggagacagtgagctcctggggaaagcatgggtcatctgctagggaaacgttgcctctgacagcagaccctcagctcctgcccctgcgtcatgtgtgtctttcctacaccccgcagtcctcctccccagcagagagccctttgccttagcccagcaaggactgatggagaacctttgggtgcctggcttggggccccgctgccatacctaccctgcttgtgccaggatgaactgccgtctcttctctgcaggctccagcccggagcggtccccagtgcctagcccacccggctccccgaggacccaggaaagctgcggcattgcccccctcacaccctcgcagtctccagtaagcccagagcagggaccaggtggtgggtgacctggctggtgtggacagggtcgtgcgtggcaaagtcatgacagggcctcagctaggaaggaggaggggatgggggtagcaccatgcctcttgtccccgtacactccagtcatgtgccccccagaaggattggccttgggtgaccctggactataaagggtaacaattctactgagaaggcgagccccatgtaactaactcccaacccccccacacaggaggcacccacggccattgaagctggcctggctgaggcaagtgttcccctgagcatgtggcttttctaggtccccagagcactgggcctcttgtggaccacagcccaccttaatccaagtcatatctgaaggagaggagatgtgttgccaaaaaaaaaaaaaaatagtctggaaaccattagcttgggctgggcatggtggctcatacctgtaatcccagcactttgggaggccgaggtgggcagattgctttgagctcaggagttcaagaacagcctgagcaacacagcgaaaccccatctctacaaaaaatacaacaattagctgggcgtggtggtgcacacctgtaatcccagctactcgggaggctgagggtggagaattgcttgaacctgggaagcggaggttgcagttagccaagatcgcaccactgcatttcagcctaggtgacagagtgagaccctgtctcaaataaaaaggaaactactagcttgaagtatccaggacaccacctccccacccccaagctccctgggtcaccccacctggatgaccttgccctggtgatccagcttagggacccccttattcttaggggagtccagccctggcataggagaaggcacacacttctctggggacatgcacgtgccctctcctctctgccacagaatcagacagtctggtttgtgtcactatggccacaaagagcaagaggataaaatatatacactggtccatgtgctgtaaaactgcctggaggagcaaaattgctcccagctgggcccagactaatggctgcctatgaagatggtgtgaggtgggggtggggctaaggcagtccagagggagggtgggcagaggctggaagcaggaaagcaggagcttgagccaaaccctgcctggggctacctgagagacacgtccaaggctcagcctggagcctgggagggcaagggagcccgagcaggtgggcaggtggggtgggccaggtccagggctggtctggaccacagtcagtggaggggagtgtcttccccatgcagaggaagcattggggctgtgggggatgggggtgtccctgctggctgcttgctaattctaagtcttgcacttgcagaaacccgaggtccgagccccccagcaggcctccttctctgtggtggtggccattgacttcggcaccacgtctagtggctatgctttcagctttgccagtgaccctgaggccatccacatgatgaggtgaggtcggctgggctgagagagtgaggtggggaaggtggggagttcctcataccttggtcccaaaagtactgtcaccgagacatggggtctccttggaggccctgccacccccagtctggggctccccactggggtaaaagttggaggatgggccccaggcctgggtccttggcctcaactggagcagctcccaaccctctgtaggaaaagtcagactttgtttttaattttgaatttttttgagatataacaaacataacaataaaatatgcaaatgttttttattttccttttttttttttttgaggcggagtctcactctgtcgcctaggctggagtgcaaaggcacgatcttagctcattgcaacctccacctctcgggttcaagcgattctcctgcctcagcctcccaagtagctgggaatacaggtgtgcgccactatgcctggctaacttttgtggggttttttgtttttttttgagacggagtctcactctgttgtccaggctggagtgcagtgacgcaatctcagctcactgcaagctctgcctcctgggttcatgccattctcctgcctcagcctcttgagtagctgggactacaggcgaccgccaccacacccagctaatttttttttttttttttgtatttttagtagagacggggtttcaccgtgttagccaggctggtctcaaattcctgacttcgggtgatccgccagcctcggcctcccagagtgctaggattacagatgtgagccaccaacctggcctttttttttttttctttgagacagggtctcgctctgtcacacaagctggagtgcagtggtgtgatcatagctcactgcagcctcaaactcctgggctcaagcaatcctcccacttcagcctcctgagtagctaggactacagacagcaccaccacacctggctaatttaaaaaaaaaaaaaaatttttttttggagagacagggtctcactgtgttgccagggctggtcttgaattcctggcctcaagtgattatcccactttagcatcccaaaaatgctggaattgcaggcgtgagccaccatgcccagcccacaaatatttttctaagcttgtagacaaacacacacatatacaaacatatatgtgtttttttaagtaaaagtgagatatacaacttgctttgttttaaagcttcaacactattttgtagatatttcatgtcagcacatacgaagctaccactttctttgaacggcctagtattccatagtacagatgtgtcataatttatccattcccctattgacagttttaggggggttttttcctcctctcatttttcactattacaaaaagtgcagcagtaatatccttctttgaaaacttgtgccgcaatctccatggggtagattcctagaggtgattcctaggtccaacatctcaaatcttttttcttttccttttttagtaaaaaggaaaagaaaaaataataaaacaagaaataaaaataaaaacaagaaaatgaaggttctaagggctgagttgacaagtcacacagttgttttgaaagacatgtttcaaaaatccattcaaatgttgggttttatgtgggacctcaaggaccttgggacctcaagaccccagtcctctgaatatgtcctagagggtcggcaggcagtaggtgaagctacaggagacctcaaagctctcaacccagactgggatgggaggtaagaggggcttcccaaggcctggagactggatggaagggtgaatggagacatagacagacaggtaactgctcccaaaatacatgggacttgagcttcatgagactggactgtccttccttccacatcacaggaaaccacaaaggctctgagcacttacagccctctaggagctgcagggcatcccagatgtcttgctgatcaacacacatggctgaggccatgctggggctaaggacacatccaggaacactgtctctgtcctgtggaggtgacagtcacaggaaataactgggggacattccagcctcctcccaagctctctcttcccaccagacaccaagcccctaacatctctagaatacccatctacttctctccatggccactgatcgtgcccaagttcagccccgaccttctctcacctggatggctgcaatatcctcctccttggtttcctttctccatgctcccttccctgcattctgttgctccatgggagccagtgacctttctttctaaaggcaaatgtggtcatacctcttggctactttaaatccacgaagacagaattctgaatggccttctgtgctcttcatgatctcaccttagcattcttgtgttttctcctgctgcctatggagccgacccatagctagttctccctgctctttcacatctgtaagtttttgcacatgctgttccctctgcctggattcccacccaagaagggagggttgcactgactgccctgtgcctccgcaggaaatgggagggcggagacccgggcgtggcccaccagaagaccccgacctgcctgctgctgactccggagggcgccttccacagctttggctacaccgcccgcgattactaccatgacctggaccccgaagaggcgcgggactggctctacttcgagaagttcaagatgaagatccacagcgccacggtgagtcacagggctccagacagggaggcggggccagcatggaaaagggcagggctaatgggggtgggtgggacaaaaccaaaacgtgtgaggaccggcccgatggagtcgtggctgagagggggcggggctaaagggagacgtcggactccggtgtgggcggagctcagaaatgaggtggaggcggggctaatgtgggtggggctaatagtgaagctggggttgcaggaggggtggggctaaggagaggggtcggggcagagctaatgtcacatggggcaagagtgggacggtggtaaagaggaggggaagctccaggaaacggggtgattttaagagcgaggtcgtcaggaaatgagtgccaagctgaggcctcctgcagagccgccctgtgtccctgccaggatctcaccttgaagacccagctagaggcagtaaatggaaagacgatgcccgccctggaggtgttcgcccatgccctgcgcttcttcagggagcacgcccttcaggtgcgctgcggccccacctctgccgactgtggcagggaccccctattttcccctcatccgaaaccgctcccccatcccgtccccgacattggatgggtagccaccgccggagctcagaggtcatcttctccagtaccctcctccctttttgtctggtagagcctgcaccaagccatactgatgggaggggggccgattcttccagctctgctgggaagtccttcctgtgatttgattagtacctccagttccgcagagggctgaagaccaccctccctccaagccagctttcctctcactgccccctcctgtaccaggagctgagggagcagagcccatcgctgccagagaaggacactgtgcgctgggtgttgacggtgcctgccatctggaaacagccagccaagcagttcatgcgggaggctgcctacctggtgaggacgtgcaggcgggcccgagaacactgctcaggaagggccaggcctgtccccatgcttgcatgcaccccaccacccttgagaccacagagtcattgtggaaagaacttcagcctgctcctgatgggagtttgtagagttgctcccaccagaagagggagtgggcctgcaggaacaggggacagagggacaaaagacacagcccaggccagtgtagacagtgccttaagtcaggtgtcctaaaagcagagcccaagatggagagtctttttttttttttttttttttgagacagtctcgctctgtcgcccaggctggagcgcagtggcgtgatctcggctcactgcaagctctgcctcccaggttcacgccattctcctgcctcagcctcccgagtagctgggactacaggtgcccgccaccacgcccggctaattttttgtatttttagtagagacggggtttcatcgtgttagccaggatggtttcaatctcctgaccttgtgatccgcccgcctcggcctcccaaagtgctgggattacaggcgtgagccaccgcgcccggccaagatggagagtcttatatgtgaggtctattgaagaaggtttctcaggagaaaggcgagggagggaggcgggacaggagaaggagctatgaaggatgtggtctttgctggagtctagcctcaggtttagcctcagctagatcccatggggagctgcagagggagaactgtagcacagagttggggccggcttcttgcacatccgtatcggtctgtcactggttctggggaaatgggagggaaacctctccaagtgaggccattcccattcagctgagggcagttatccagaggaggtagcagctgtgagccaatagcagccaacactcacagtggcaggcagggcacccagaacattcacttcacttggcatcagtattttgagggacacccccaccaccgcccacctttgttggttcttgagcaggggaaataggactatgaaataaagggaggcgattctagccaatgcatacaggtcttcctaccactgagatgctcaaaggtctagagcaaggagttggggggggctcccgtggagacagagagggcatagcctcaagactcattgcttggtcgtaaccctagagccttggatacagaccctaagctgtccaaaagggatctcaagcctgcctgtggacaccctggagggacccccaatcctcccatacctatgggccaggcatgacccagggccaggtctgtaaatgtctacacttttcactggaaggagctaaccctgagcacagtggacatccctgtgcaaagatcaggacggaagcaaggctgtccccagccagaacaaacacctgctcccccagcgtccccttgcctattttcccaccctccttctcacgctgttccctggctgctcaggaaagtctggccctgggtaaaagtctccattcacacccttatccctctcccctatctggtcagaatctggggaaccctacaaaaccataatatacttcccacagggatcccctaccctgaaggaaataactccagatctcaagtgtttttctccacccaactggcctgtcttggtgcctggaatttcagcttcctccctgctgtatcagattccctgggaacaaagttctcctggaagtggggtggcctatggctaccgtctgacaccagcctagtggagaaagagggttcaatgagctaaaagggctccccaccacctcctctgagccatcacacacccccacattgtgctagagtctctgccaatacccccagccagcgctcagctggccgcttgtacctgtgaaggggaaccttgctgcagccccgctatcttgggaaatttgaaggggcagatcccaggggttctaggtctgcattctgtctagagtcttttcctgctgggcaacttcttggcatatttggccagggccattccctccccagcctggtcacagcgtggctatgaggcagctccaaatttgtgcagcacagaggggcctgagaggcctaacatgggtggggtgtgatggaggaggaggtgggagccccacaggccgcggttccccacctcacagtgccatcttaggtgtgacagcccacagtgctgcctgaccctgcccaccacccatccccaggctggactagtgtcccgagagaatgcagagcagctactcatcgccctggagcccgaggccgcctcggtatactgccgcaagctgcgcctgcaccagctcctggacctgagtggccgggccccaggtggtgggcgcctgggtgagcgccgctccatcgactccagcttccgtcagggtgagctgcccccggggacaccacccacccctggagggtcagagggtcactgaagccagaagctcagccatgtctagtatgaaggggagagggtacccaccctggaggagcccaatttgagcaggcagaaacatggctggtggagcctgtctgaggaagggaggcacagccctgcccaagggcaacctcgtctcagggtgggacatgccctacctagggcagcccaatctcagggtggagatttcaccttgccctaggggagcaaagtctgaggagggcaggactccgcccagccctgagtctgagggttgggggagacacagactaccccaggaggaaactgctggggtactgacaaaggaggaagtcagcccactgcatcagctgtccccttcactcccctcatcttccccgacacacatcagccccaagctcctgctgccaggaccaggcacccaggccaaggacagctatggtcatcctcccaaatgccatctcccagggcagggagaagccctaagtcctgagtcccctctgagactccaaagacctacctgcctccgctcctccaaacccctctaaccctgattttgccatgacctgagacctcctgcgttaaaggaaggccctgtgtccataaatatttccccacagctgttggatacagggtgggagtttggggttcaggattgccctctcccagtcaggagcaggttggagtttcaggagcactggctgctcccagtgcccatggaggtcctgggcaggaggatgggagttgaacgccatagctggagcacctccttctaatctcactccctgctgtctcctgacccccagctcgggagcagctgcgaaggtcccgccacagccgcacgttcctggtggagtcaggcgtaggagagctgtgggcagagatgcaagcaggtagggggaaagggggacggagtgttatccttggcccctaccgggcaccatatactgatggggggaagggcatgtttgcaaagcccgtctcttcctcctccattcgctgtacccaacctggccgtcccctcacagtcacccgcacccccaccccactcacagcggcgcccctaactcccactcctccaggggattctccgcggacgctcgggtggagttgcagagcctctggaaccatttctgccccacaccctgcgcccatatgtggtggtctgaggttcaagcacctgaagcccctcacgtccctcccccgaccctgcagacaggccttgggacccggggcagggctggaggctgggcgaggctggagggggcgcagggctgagggtgcgaggccgcccacgagtgtgtgcccgcgctcgccgccgcaggagaccgctacgtggtggccgactgcggcggaggcaccgtggacctgacggtgcaccagctggagcagccccatggcaccctcaaggagctctacaaggcatctggtgagtagccaggcggcgccccggtacccagcgcgacccgggctccggccccgccactgccccctggcggcccggcgagcgctgacgccctcttcgccccctgctccaccccagggggcccttatggcgcggtgggcgtggacctggccttcgagcagctgctgtgccgcatcttcggcgaggacttcatcgccaccttcaaaaggcaacggccggcagcctgggtagatctgaccatcgccttcgaggctcgcaagcgcactgctggcccacaccgtgcaggggcgctcaacatctcgctgcccttctccttcattgacttctaccgcaagcagcggggccacaacgtggagaccgctctgcgcaggagcaggtgggtcctgagcccgcgggctcaggcagggtttgccgacccgggaatgaccgtgcactggagggtcccgggccccaaggaacggtgggggtctgcctgattcatcccacatatacactaagccagcagggcgtcggggtggggcggcggggagcggcgagtgagtgccccagcccagcaggctccacccacggaatccgcagcccgaactggggcaagacagagaatcatagcggggaggcggcaatgcctatctcctcccagccttctctacacccccaccccgggccctgcgggcccatgctcctcggtttccctgcaccaaagcaaggggaggcccctcccaggacctcgtacctggaacctggagcaggctggcaactaaatcctctgagtgagtagggtggagataagggactaacatcccgcaggtccagtcctccagacaccacgtgcagtcggtgcccaggcacttctgcctggaggcagaggtagagaataaggaccacggaccccaaactggggcaagcagctgggccctgaccgatggatatttgcccctttcaccaccaacagcgtgaacttcgtgaagtggtcctcacaggggatgctccgaatgtcttgtgaagccatgaacgagctctttcagcccaccgtcagcgggatcatccagcacataggtgagcacctgagcttggtcccccacccgcccctacatgaacaaacagatgcagaataattcccccccatcagtgcctagatacctccacacatccatacactgtgatgagacctagaatcatctagaacacctgcgggatgaagtgcagtggtgattaagagctagagggttgatatgtagtcttgccaaggcaaaaaacttctggtgcctcagtttccccatttataaaatggggtgatagtattgggttctcaaaacgttatcacagggataaaatgagctgaagtacctagagtgagcacaatgtcttgcacacaatgtctaggtgtttaatacgtgtaaaatgcatatccttatctctcgtcctccacgtcgtggtgggagagaagtggggagcgtgagtgttggggaggcgaagccctcgaggactcccgtgagctctcaaagaaagtgctcaaatggctactttctagtcgccaggtaggtacaggctagggaggggaggcgccggtggccgcctagtggtggcctcagtggctctctctcccccgccccttctcctctgcccccttcacccgcgtccccccgtcctgtcccgcagaggccctgctggcacggccggaggtgcagggtgtgaagctgctgttcctagtgggcggcttcgccgagtcagcggtgctgcagcacgcggtgcaggcggcgctgggcgcccgcggtctgcgtgtcgtggtcccgcacgacgtgggcctcaccatcctcaaaggcgcggtgctgttcggccaggcgccgggcgtggtgcgggtccgccgctcgccgctcacctatggcgtgggcgtgctcaaccgctttgtgcctgggcgccacccgcccgaaaagctgctggttcgcgacggccgccgctggtgcaccgacgtcttcgagcgcttcgtggccgccgagcagtcggtggccctgggcgaggaggtgcggcgcagctactgcccggcgcgtcccggccagcggcgcgtactcatcaacctgtactgctgcgcggcagaggatgcgcgcttcatcaccgaccccggcgtgcgcaaatgcggcgcgctcagcctcgagcttgagcccgccgactgcggccaggacaccgccggcgcgcctcccggccgccgcgagatccgcgccgccatgcagtttggcgacaccgaaattaaggtcaccgccgtcgacgtcagcaccaatcgctccgtgcgcgcgtccatcgactttctttccaactgagggcgcgccggcgcggtgccagcgccgtctgcccggccccgccctctttcggttcaggggcctgcggagcgggttggggcgggggaaacgatagttctgcagtctgcgcctttccacgccctccagccccgggggagataaggtcatgggagagtgggtggggacacacccagagactggctttgggattgggcactggtccgctgactgccaggctgaagggacccgccaaggactgaacgggtaagagaagaggtttgcaagacagagcgcgcagcccggcaaggggcatgtgaccccgaaggaagaacgcaacagaagagtcctggtctgaacttggccgagtaggggtgggggtgggatggcaggaggagccgcaggaggaaggaggttgtgcagggtctggacctgcagggctgaagttcactcatcgaccgactcagccccaaccgggagccaggcagaaaaaccctgtgccgtaggaaagtgactggaagtggactccagagggacaggtgtggtggcacagtcctggtgtggtgctgaccacccaaatatgactgtgaattgtggaaagggcagtagatctctaatgtggaggtgggaacattattgtggtggaggcaattatgagggtagcatttctttcgagacaaaacacccgtctgggaaggccccaaggtcagcttatgaaggaccccacttgcaccccaccccagccatggaagagcagctggagggtggatggggaggccagagggagcaatgaggggtggtcccagctctgctattgactcggtatgcctttaggacattctcttaccgctcatgggcctcagtttcctaaagtgtgaaatgtcaggcacttccctctaactggcatgcaacagccccacctgcctgagagccctgaggtgacaataaaacatttatgctcaaggggaagccacagcctgctgatatggcgtggagaccctaatagtgggaggaatgcaagggttcccggtgctagagagagaagggagaaagctttcagctgtgcatagggaactgaccagaagggggtgctgctgtctcccatcaagcatcccaaacaactccactgcttaagacctctctggcctacacatgaggtccctctctcctcattcaaattaattgtcttggcagccagcttctggcctaaaatgccaccacctgtgcatacctcttgtggggctaggtgctataataccacgcggtgcccctgcctcctgagtgagtctacccaagtctttccctggcccatctgcaaaggagtaggcattaccccaaccccagagaacaaaaatccacctggcctccggtatccactggaagtttatttctttagggttctatcccaaccagtcgcttaaaaaccaagtaacacagacctgaggggtgggggctggggactgcacctccctcctactcatggtggacagcagtggggactagggaggggcaggagaggtggctgaagcaaggcagcagtaatggggccacgacgccacagagccagctccgtcctctcccagaccctggtgggagtccctgtggcttggggtggggagtgggggacccaccccaggccctccctctcccttcctcagacagcctcctttcgggctcaacccatttcttccggcaggagactgaggcacacagagaggaggaagtgggagaggaggacgagggaggggcagggtggcagcacaaatgaaggcagaggtgagaggcgtgggcaaggccactccacccccacacccaccccagagaggggcgaggaagccacaccatcacgcagcatgtcggggggacaaggcggggtttaaggctgaggggcccggggcaggcggggcctcgggcctcagtcaaagccgtgccagtcgctgtgctctgagtcgtattccagctcggcgcccacacacttgacaccatccagcagcatgggcgtgccgtggtgccggtctgcaaggcagggtgcaagtcagtgccatgctggcccccggccccacccatgcggcccactaaggggacccctccccttccctcagggatcagctggaggtagggacctgccaaggaggttgagaacccctgagccgggcaaggatcccttgttcagccttggttccctgaggaggacagaaaccctcgcagtcgagcttgtgcatccctcctccaaccaggagcctcacgctctcacccatgacgcgggcctgcaccgtcacgcgcacacaggtgccagtgccaccttcgcaggctagcagtatctcctctttgaggacgccctctttgtgcgccgagtactcacacttgacactataacctgcccggggacaggggcaattggtcagcacctcccccagcctccccgatcctgcccctggcactcacgggcccctacccaccaccatggggggactgcatgctaagcccccccaagaaaggggcagggatggcccttctggagcccagagacccattccccctagcaggggtgcacaggtctcaaaaacccattcttcagtgagctggacatgcctccagcctgtgggccaccccaatgtggctccaagagtgaatgaagtagggtccaattcaggcttccaaaagaaggtctggctgttttctcccaaaaggaaggcagggagaggcggtgatgaggagtgaggggggcagggcagggtaggctttgagcagatccgatggcaagaggtaaaggcctgaggggtgtcaatccattgaagggcaaggtcatgaagaggctggtgacggggacatgaaactgaagctggagctccacgaaactgacaccctagcctctgccaggctgggagtggggcatggggcagggcctgaagtgagcctgataggaacagcagcctgaaacccaaggtctgggactggtgggtgctaggagttatccacacggtgtgtgtagctccagcaggtttttctagagggttagggaggcaggagggaaggctggaggcttcaaaccagttcctcagcagctcccatcttggttactgccccacggaggtaaccatcacaccatgggcaggtacagggaagtatgagctcatggacttctgttcaggacagggagcaaggcctggagtgtgggacctgccatgctgccacagtgcaagctcacaaagaggtgccacatccccgacttgctgagctgcccatccaccctagttggaagtaagggagcaccccatgttctcactcccacacccatccaggccctgctggaggaggggacgcaccttcagggacgggcaccacgctgaggagcttgaggtgcaggctggggacaggtgcctcgcggacatccttgctcagcctgtgcactgggggcagagtgaaggtaatctcatacctgtgcaggatcttcaggaagccaacctacagcaggagaggtgagggagggaggcaccttcacttcctgcttcccgcaggcccacccagttgtgccacctatgatcccatgcgccccagcacctgcttccccagagagcccagaaagcccaactccctccatcactccagctgatcgacccccagcccagtggccccagccctttcacagaccccttgagggtcccagccctacagcttggccagcaagatcctcagcatctgtctcacgggccccaaagtcctcagtggctcatttcatagacaggaaaatggaaaccacaaaatgactggccaaaggctatgtagtgtggccagggtcaagtcctccctagacttcttggccattcctgctatgcatggcacccagcaaggcaccacccactgcctacaagggaaagttcaaagtcccatgggtcattcacctgtccccatcactgccagtatcccagggtcagggatgctggtcctccattcgctcataggatgacaccaggccacagatagcgtgggatgagggatgggatcaaattagagatatgacagtagaccagctgtgtcagcccagagctggcccacaggcctggcaccagccactgaactggggctcctggctgccctgctggcactggactggggatgcctgcctgcccactcaaaggctgtgtccaatggcccatactcacgacccaagcaatttctgttgttcattcacagtgcttggtgacaaccaccctctgggacaaatgccattcttggaaactccagtagtatgaagggtcacaagccagggtggttgctgagcaggggggctggtgggggtgccacgccagcaggcaaagggtgcctgctgtactcccagcttgcatgggcacacagagtcctgctcacagttactggggctgggcagccccatccctgggggccaactgggactggctgcagagagttttagccattcaatgggaccaggttgatattgctacatgacaaacttcaatccatgtgcccccctcatgctctgctggtagggggcacatccctcaagaaggctttctggctgtacctgctaactgtgaccctgtgacccaggggtactacttatagaattttccaggggaaatagagatgtgcagaaaaatactcttcgctgccctatttataacaatgaaaacaaaaacagccgtaacacccaggaacagggagccagctaagtcaatgatgacacgtatcatggaccagtaggcagttgtaaaatctcgtggaaaattatttactgacacaggtaggagacagttcacaacagaagcaagcaaaaaccagtgtggacacggtgaggccagcttttgtttttggaaacaaagctttttaaaataagctggatccatcaccatagtgttttcagaaaaataaataaataaataaataacattttaaaaagctggaataagccaggtgtggtggctcacgcctgtaatcccagcactttgggaggccgacacggacggatcacgaggtcaggagatcgagaccatcctggccaacagagtgaaaccccgtctctactaaaaatataaaaaattagctgagagtggtggcacgcgcctgtaatcccagctactctggaggctgaggcaggagaattgcttgaacctgggagctggaggttgcagtgagctgagatggcgccactgtactccagcctggagacagcaagactccgtctcaaaaagaaaaaaaaaagctgaaataacacacatcagaatattaaccatggttattttgggatagtatgactgtgggtacttttaaatttcttcatattttctctgtcttccaaattttctcatgtctattaagacatgagtggattttgcaatgaggggagagagctatttttaagtgttggtttgttccatttactctcttggggaagctgtcagctgtaggacaaagagtgggaacttcagagttggacagaaatggatacaaacctgggccccccaggttcttttttgtttgtttgtttgagacagagtctttctgttgcccaggctggagtgcagtggcacaatctcagctcactgcaacctcagcctcctgggttcaagcaattcttctgcctcagcctcccaagtagctgggactacaggcgtgcgccaccacgctcagctaacttttgtatttttagtagagacgggtttcgacccattggccaggctaaacctgggccccttttgagcagcgcagcagaccccccactcagggccatctcaatgggccagacctcccccgacccaagggcactcctgttcaactctggacccctgatttattgaccaacctgaaggcctcagtctccattttccccaatccagctccaccaagcagaaaacagggggtgataatactacttcaaagagcctaactgagccagagatttggcaaagaagggttaaaaaaaaagttgcaccttgttattgccatagttagcttcacacctgtatcacatacatacattcttccattctcacaccaactctaggggatgtgattgtctccacttgagagaaaagaaactcaggtgaccttcccaaggtcacagagccagaatggctggcctagacctgaactcaggccactggcaccacagccacgacactgccttccattgctattgtctgggtgaagcagatgacagcagtggctctgctcatcttgatctggatgacattctaaatgctctcatctcattgaaatctcactgcctcccatctgacagatggggcaaccaaggcacagggaaaggcacagacatgcctataagcccggctgagaggaacggggataggcacccagaagccaggcagagccggggaggggaagaagctgctgatggggtaggtgtgcatgtaccttgaccagaaagctgctgtcactctcctgggtgaccatgaccaccgagtcatgcagcttctcatcaaagtggacgtggctgtgggatccttctgcatcgtggcctgccgcaaagcggatactccggactctgggcttgttgcctaggaagagtgggagagggctctgagggctttccctgtccccaggaaactcctcccccttgtcccctcgtcacccccaagactgcccttgacatcatccagctcccactggctgggctcttttcagggctagatggacactaggatcatgaggcttgaggcctccccgccggccccgacctgcccctcccacaaaaatccatcccctgagagtgagcgtggggggactcagggactggctaatatgacccttgcttggagggggtggggctggtgccagagccaggaagggacagtcttccagactcccaccaagccagggcagcgtgggactcagcccagtcctctggataccctgcccagtgctctccttcacagtgcaaagctccccatccctggggcctacccctaagctgtgtcagtgcatgaggcccctgcctgcccatcctcatgacccaaacctgaaagggcagggacaggaacaggctctgggggatctgcctggggtggcagaaacaggggggatcaaaaaacacactcaggccacctgggcgaggctgcagctgccagtaaacctcactggcccctggcagcaagaagagagaatccaaggaagcttccagacccacctcaagacccccttccttcctctgtctagcccaccatcaaggccctcagctgtctctgagctgggtcgggttctccaaggccagaaagggcagacggatgagacaggcagggtaggcgggagccgagctgaaggcctggactggatgaatgctcaggctgtagaggccgagagcacggccctagtcctctctgacccctggcccctaggccctcccaccaagagccctgcccagggtcctcttggcgggaggacctgatccagctttgagccggcctcttggatactcggaggcccaggggaccagcctggcacatccacaatccctggtgagccccacagaaccctcaaatctcaccagatcaccctggcctaaaaccctcccttatcccttctggactctgaaagaaacccaaactcccttccacagcctgctgtggccctcccacatcaccagtctcagtgctcaccataagcccctcggctcccccaacccccacagtggaacggcagggacacaagagcacacacctccacagaccagcctaaggagtcagcagggctctgcaggggtcctgctagggcttgcgtgagccccagaacctggcacaaacactgacatagtcccaatcacattcgcacaccagcacacacgcactcacacatgcacacacacacacacaggtggtgcgggccctacctgcagcaatggccctcctaccagggcccaccggaagagcttgtgcaagtcctaccacgccaggaaggcacttacccttgttggctgcagccatggacgccctccctgccacgcagctcctgccagacaccgccactcacgctcagcagcctcccatgctccagggacaccagcgggagcctgaaggatagggagtggggagggcaggggtcagggccactcatggacccatggctcagggacaccagaggagctccctttaggaaggactcaaacccctaccgctctcagcagcccaagtggtgcctgtactctctagcacgggggcttctgcccaccctctaccgactgcccacattcaccaagagccctcaccccttcctgataccccagtgactcagggtcctgccagcatgtgctgagctgcagcttctaggtgccaaagcaacagcataggactcctatccccagcacccccagagactggcaggaggggcagcctggaaaggaggactttattggtattttccagggaccagttctggtgctgctgaccccaaaggctgggcctggagctaccttattcaggtcacacaagcaatgcagctgggtgcggtcagaggcaacagggtgctcgatggtgggcaagaacaggggaccacataaagtaagcgtgcccttagagctttccctcctggtgatcggtcagggccatatgcaaaacagatgcctgtggagggggtgtgcccccacctgaaccccattcagaccctgccctgagtctcaggcctgcctccgcctcagctccccaacggcagcctcagcacaggggcagtgagaggcgccccaggaagcctccaatgggccgagctgggaccatctgagcatcaaaaagaataatgagtgcaactgatggaaacagatggaacacataaaagcagtgcattcacagagattattagaaaagaagagagaaagcaaaacaaacaaacccaagccctcaaaagccctcatttgtcaccactgacggtagcagtgccctctttactctgaaagctgaggattaaagaggaagaattcagcctgtctcttggcctttcttgtaaccaaattgccctggtggttgatggaaagctcttctttcggaaagaattcttgctaataaataacaaagaaatgaccaaatgctaagtcattctgcaacccctaaaggaacaaatgctggaggcaacaagaaccagtggatgctaaaccagaggggaaggttgacaggaagcagatactcacaggcgcccaagcgtcactgacagaggacctggtatggtttttgttttttttttttttctgagacggagtttcactcttgtcacccaggctgggatgcaatggcacgatctcggctaactgcaacatctgcctcctgggttcgagcgactctcccacctcagcatcccgagtagctgggactacaggcgcccgccaccacgcctagctaatttttgtatttttagtagagacagggtttcaccatgttggccaggctggtctcgaactcctgacctcaagcaatccgctcacttcggcctcccaaagtgttgggattacaggtgtgagccaccatgcctggccgaggacctggtgtttaagaggaatggcacaagtttgcaatggaggtatgtgacttctcccagtcacacactggtctatctctctactctctgcaggacagcctgtcacactgatgcctcctgaagtaaggcagcccaaagtcacagcatcactgacaagggattcctgccaaaaaggtttaacctggaatctaaaccagcctctaacttcaacttctcatttgctaaaaacacagaggagaggggaacaaatttaatgactccatgagaaagcaatgagacgagcccagaaggcaggatattctacaggatgactgacctgttttttgtttttgtttttgttttcaaatgtcaagaagaaaaagaaagcaggctgggaacggtggctcacgcctgtaatcccagcactttcacggatcacaaggtaaggagttcaagaccagcctggccaacatagtgaaacccagtctctaccaaaagtacaaagattagccgggtgtggtggcgggcagctgtagtcccagctagttgggaggttgaggcaggagaatcacttgaatccggaaggcggaggttgcagtgagccaagatcgcgccacggcacttcagcctgggtgacacagcgagactctgtctcaagaaaaaaaaaaaagaaagaagaaaaataaaacgagggagattattctagataggaaagcagcaaactacagctgattacacagctgatggtaaggttgctgcctgttgtgtttttgtttttgtttttgagacagggtctcactctgtccagcccaggctggagtccagctcactgccaccgtaatctcccaggctcaagcaatcctcccaccccagcctgccaagtagctgagaccacagccacgcaccaccatgcccggctaatttttgtagagacagagttgcccaggctggtctcaaactccggagcttaagcgatccacccacctcagcctcccaaagtgctgggattacagacgtgagccgccaggcctggcaaataaatttttgcaaataaagttttactaatagaacactacacttcattcacttacatgttgtctgtttttgcactaaaacaaagttacttccaagtagttatgatagagaccatatggcctgcaaagtctaaaccatttattatttggcccttcagagcaaaagtttgccaacccttgttctagatcaacacacacttaacagaccaaaaaaggataatcttcaggacaactgacctgtttttttcaccacatcagctgcaagaagaaaaataaaggagagggtgtttcgaactacctatcaaagaagacattttggggggtgccgggcgctgcggctcacacctgtaatcccagcactttgggaagccaaggcgggtagatcacctgaggtcaggagtttgggaccagcctggccaacatggcgaaaccccatctctactaaaaatacaaaaatcagctaggcatggtggtgtgcacctgtaatcccagctactcaggaggctgaggcaggagaatcgcttgaacctgggaggcggaggttgcagtgagccaagatcccgccactgcactccagcctgggtgacagagcgagactctgtctcaaaaaaaaaaaaaaaaaaaaggccgggtgaggtggctcacgcctgtaatcacagcactgtgggaggctgaggcgggcggatcacctgaggtcgggagttcaagaccagcctggccaacatggagaaaccctgtctctactaaaaaatacaaaattagccaggcgtggtggcgcatgcctgtaatccagctactcgggaggctgaggcaggagaatcgcttgaacccaggaggcggaggttgcggtgagccgagattgcgccactgcactctagcctgggcaaaaggagcaaaactccgtctcaaaaaaaaaaaaaaaaagacatttgggggatctggaaaatgtaaatggcctggatatgaggtaacactaagaaatgagttgatcatggaattgtattatgtaaagaattatgtccttattttgtcagggaaacatactgaacaacttagagatgagtgacactggctcatcagtccagggacagaagaggaactacagggtggcctcatagtttagggctgggcctgtggagggcatgatctcaaggtccctctggtgccaagctgctctgggagcagatgtggcctcacctcgctccccacttctcaatgtgggcaaagtccacccaggcccaagccctgcctcatgggcagggtgttcacagtttgggtaccaccaggagccccctttggccaatggaccaggccagcaaccccctcttggaggtgagcttccaggccccagcccagggtgcaggaagtggagctacacccattcacctctggccagggccactgtggggtcagttgcctcagccctggaaagctcagcttgtccccagggaacttggtcttggagagcagcctgccgtaaccgccccccgactacagctgcccccaaagctgtgaactcagagtatatgacaaatggccaagcacaagagtgtgaggccctcctatcctgcagaggctgctccagccacacctctgcagccaggaggcagtgacagcccagtgtcctcaaggtccccccatctcccaggatgcttcctgaaggctctggttaaactgcaccagtggctggtgagcaaaggctgcaggcccttttcacaaaacactctgaactggtccatgcagggcaccctccctgtcttcctcccaacctactgcctgaccgtccccccgccctgcctttgcccaggtcatcccttcagccaggaacaatcccgtccctcccagccacaccttcgacagggtctcagccccaacatttcttttttaaggatgcacaccctgcaaatcccaggacaggactacagctctttttggaatcccctttctcatgtctgggatcatttgatatccctcttcctcaccttacaagggtagtgactgtgtttttgtcaaaccctgtgtccccggcactcagcgcagcaccagacagggaggagctgtgtttggtttatgtttgttgaatgaatgaccacatcacatttgcttggagggcctggccaaggcccgtacttcagccctaaatgatatggtcagggccagtgactgcactgggggctctgaggaagcagaactccccaccccactcttttgcctcacccctgccctggggggcacttccctctccctggcccccaccaagtggcctcccactgggactcctcaggccttgctgcagtcagctggttacctgtccatgcctgctttgagagggacatgccccatgcccactgagggtaggacccacatctcatgcagtgccagtactcagtaaagggcaaacactgagggcctgtaaccctctggatagtgacaacatagaggcaggaagcaagggacttcaggaacccaaaggaaactgggaaaaccaaacctcctttctcaatggagaacctgctggtcgctgtcctcggggagctagactcttgtgcacacacaattcctcatcagaaacaggcaaagagggcactgggcctcccctgctgcagctgtgtccacagagaacagctaggccaccacacaaccccaagcctggccctgcctccagcctcctcctgtgccaaccaaggcctcaccatggctcaatccacatggcccccagaggcagcagtcctggttcaaattcaggatctgcccttgctagctgcatgggtgagttctttcacttctctgtccctgtttcctaatgtgtaacacaggaataagcagtggcctcttccttccagggtttgctgcaactgtgcctgaagctctgtgacaatgcaccccccatctctgcaaaagcaaacccccaaaggcctggtttctaaagcaacagcagtttcagcagcaccgtcagagaggcacttcaggccaatcctggaggagccaggagtgacccttagagtgggccccagggacgtcagccttcttggaaaacagctcaaggggtgagggggcctccctcctcctgcctcccccttctcccactcccaaagcagccaggtccctagggagggtcagagaacagatgctgggagtttccagtccccctaaccagagggggtcacaaggaagatgtgcagaatgaacatcctgggaaactgggaaatgactagggaggaacatggtgcctccccgccagcaaaaaaaattatacccttccccatgagatggagtgtcagcaagcttccaggccccagcccagggtgcaggaagaggagctacacccattcacctctggtcagcatgctcccaacgtctgagacctcatttctcattccttcttcagtccccattctcattgtggttcgaggtctttctctctgagccaggaactccgcaaccttccaccctccctacctcttcctctcctaccccagcctggggctcagtcctggctcaagcactcagtccagcagaagcactgtgtagcctcccattaaagctcacgcctgtgaaaagaacagccattgaggccttgagatggggccacactgacccgctgactctcaggactggacacagcagaggccacacatactcagaacaaagcctggaaaggcaaggctggaggtcagtagttgtggcagcttcacatcaactcagctttaatgtgatttaatttccttctccctccagtgggccaaaggtgcaaagataagtatggctgttctctctccttctaacagtgaggtgctgggggtgggggtgggggaatatggagaagggaccctcaccacccacaccttcctgcctccccaacaagtgctgccctcctctgcccagcattctccccactttgccctcagctagtgggtgcttagcctccagatagcatgccccacctaggccctgccctgggcctgtgatccagaggtcccaagaagcagaggccaggctggatccagggggtcagccaaggtgagggtgggagcacacaggattatctcccagggacagggctgctgcctcgtagctcaggatggatagaatgtggggggatatccagctacattttccctccacaaaagaccagaatgggagagggatggggtgctgccccgactttcttcaactccccggagcagaaaaatgccctacctccactttccagtgccaagattcaagaagaaaggcaagcggagacttccctttctcagtccctgcttactaatggaaacacgggtccagaacctaaatccagtccctcctccttcataccaccgggagggaggtgcagcccaagcccccgaggccccaagggtccaggtgtaggaccctttatcctctccggcagccatccctgtgggtgtggcacccccgccacaccccattcttgtcatctcagggggaggggggaaatgtaatcggacatcccccccatccaatccatcctgagctgcgaggcggcggctctgtccctcggagataatcctgtgcactccccaccttcactcacctcggctgacgcaggagtctccggagcccgcactcccagacatcactgccctccttcctgagggtgctgaggctcggaggctcagagatgctactggtccaaggtcatgcagcgaggcagcggcaatgaacagggtcgtggggaggagggggcgctgaccccattacgcccccgccctcactaccgcactcatgcccccggacaatcgcttcgcggaaaacaccccagctgcaccagctaacggtcactgcgccccgggaacctgacatcactctagttcaggtgctggggagtcctccaggcccggccccgacagcggagccccccaccccagccctgccatcacggccgctggggtcccaggcactgactgctcaggacagggccgggaccgggaggggacctcggcgaacgggaaggaaccgggaggcagggagcagaggggtggcctcaccttgcggggtgcaccccggggccggggagggcagggacgaccactgcagcggcggcggctgcaggagctcaacgccgagcacgaggaagggagccccgcgccgcggccgccctcccgtcggcacgcccccgcctccgcccattggttgatctgggagggtggggcgagggacgctccggaccaatgagcgggctccaaagaacggccaactggcgagggccgcctacgtcacgtgccagggtcgccgaggcagcgccctgctagtccgcgcctgccgggcgagctctcgcgaggaagacgggcaggcggcccaactaggccaggggccagaaccgaccactcgaagagggagaaggagggcctcggataggccccgcccccgctccttcttccgcctgggggatagcgcctctagccttgaaccttgcttaggacgcacctcccttgggcccttcgctctcgggagggctgtcgggcgcgtctcggggctgggtggagctcccgaaggtggcctttctccctgggcttccacgccggcttcggccatcgatacgggccgtgttggtctcgttcaggagctgaggaaccctccatcactcctgtttcgaccccagggtttggacctcttccccttccaccccatcccctgtctcgaaagaagcaacccccgtgcgggcccgagacgcgtcccgggtgcctggcccggcctggagaagcatcagaacaaagaaggcacgcgggctgggggctgggagagcctgtgacgcgcccccggggaccgcagcctctgctcccggtctccatggaggcggtcgccatggcagcgagatgcgcctcgctcagcaccgcggggtgggatgtgggcgcctgcaatgagccgaggagcgagaggcgtggccctccggtctgcgggggttcttgccggtgctctccgcccgccggttcgcgaacaccccacctatacttcgcccgtggggacggattccccaaagtgccctcagtaagccgtccggagcacgcagcgccttgcttccaacggaactagagagacggcctgggcggccgaaggccagcctcccttcagcagggccggggtcgctgccttaaaggagccctcaagtctgccaccctgtggcccataacctgtctgctgatctccagtctgcacactgttggcaaattaatctttctgagctcttgttttcatcgcgtccctctcctgctccaaagccctctgggactgcctccagtagcgcttcacaaacttcagcagcactttgggtgactcatgtgccctcgcgtttgagagacagcgcttacattgagagcttttcacattctgatctcagcccatccactcctgcccactctacccactcccaccacactacctttagaccttgtcttgaaagtctaaagttggcagacggtgggcccaaagtggcccgtaggtgtattttgtttagctcacatggggctttttaaaagaagtccttccccctcctgcctcctccgcctctttctggaatcaggaatctggtttcgtggcttttgaaatatcagaagatctgacaacatgggctcactttccagcctggcattacaagcccctttaagagcacataaatttaccatagtccccgctaatccctgtttctcacggttagttaccttctgggtctgtgcagacatttgtgatcccctccccctcattatcccaccttccaacctggaaggccctccccgctctcttctcatagccaaaattcaagccctcttcaaccaagataagttttgcctatttatttatttatttatttttgagacagagtctcactctgtcgcccaggcttgagttcagtggtgccatctcggctgactacagcctccaccccctcccccgccgggttcaagccattctcctgcctcagcctcccaagtagctgggattctaggtgcgcgccaccacacccagggctaatttttgtatttttagtggagacagggtttcaccatgttggtcaggtgggtctcaaactcctagcctcaagtgatctgcctgcctcagcctcccaaagtgctgggattacaggcatgagccaccgcgcctggcccaagcctgcctttttcaaaagtctttctagccaacttctcaaaaccatctctggtgtgggctctctcaaacacaaactggctgctaactgcacagcccggggttatttccgaattgtcaactcctttcagcaaacatttactgaatgtatctgatgagtaagttattgtgctaggctctgtggagtggaaggcactcacagtttagtgtaggagggacaccacacacaaagaactgtggtctcctgtccttgccaaatgttcctcacactcccaggcatcgggcagtctggcccactgggaggagctgaaatacagagctgcccatgcctagggatactacatgctctcagggaaggccaaagatggttctggaaagcctccaggagaaaattagactctttgtgtcaggaggaagtcagggcaggagttacctggctgccccatcactgcccaatgtgtctgtgttaccacacgagtagtgcccaggctctggggcttcctgtgcggagggccttaccaaagatagatggctctgcaagggaaaccacaggcccctaccaggccccctggagacagaggcaggacaagaagaatcaggaacaactccaggttaggagaacagatggagcacgtataaaacatccactcacggccgggcgtggtggctcacgcctgtaatcccagcactttgggaggctgagatgggcggatcatgaggtcaggagatcaagaccatcctggctaacacggtgaaaccccgtctctactaaaaatacaaaaaattagccgggcatggtggctgatgcctgtagtcccagctactcgggaggctgaggcaggagaatggcgtgaacccgggaggcggagcttgcagtgagccgagattgcgccactgcactccagcttgggcgactgagccagactccatctccaaaaaaaaaaaaaaaaaaatccactcaccatgagaacctggtgacttttaaaaaaaaacaaaaaaacacaacacttgctacaactccaaacacacggttttttgtttttttttttatttttcagagacagggtctcactatgttgcccaggctggtctcaaactcttggcctcaagcgatcccccgaccttgggctcctaatgtgctgggaccagaccagaggcacaagccactgtgcccagccctctattctttttaattaaaaattaaacaactataacctcattggaaaactgcttggcagtacctaataaaaatgataaatgaaatgagtaattccactttttttttttttttgagacagagtcttactctgtcacccaggctggaatgcagtggtgcgatctcagctctctacaacctctgcctcctgggctcaagcactcctcccacctcagcctccccagtagccaggactacaggcacatgccaccacacccagctaatttttgtattttttttttttttttgagattacaggcatgtgccaccacgccggctaattttgtatttttagtagagacgggtttctccatgttggtcacgctagtctcgaactcccaacctcaggtaaactgcctgcctcagcctcccaaagtgctgggattacaggcatgagccaccgtgcctggccaatttttttgtatttttaatagagacggggtttcaccatgttggccaggctggtctcgaactcctgacctcaggtgaccgacccacctcagactcccaaagtgctgggattacaagcttgagccaccatgcccagccatggcatgtgtttaattttaaaagaaactggcaaattgttttccaaaatgactgtacttacttacactcccattagcagagtataagagtttctgttgcttcacatcctcatcaacataaaaatttgcaattttgtaaaaaacgctacaccatgctaaccaaacaaagcagggcaacggactaccagtcttcagcctctcctctgagccatgcccttgtagaggacaatttcacaacagctatcaagattacaaatgcacacacaaaaaaagagaaaacacacacacacacacacacacacacacagccaacatggtgaaaccccatctctactaaaaatacaaaaaattagctgggcgtggtggcaggtgcctgtaatgccagctacccaggaggttgaggcaggagaatcgcttgaacccgggaggcagaggatgcagtgaggcaagatagtgtcattgcactccagcctgggccacagcgcgagactctgactcaaaaaagaaaaaagagagaggaaaaaaaacacaacaaagattacagatgcatatattctttgatctaggaaccccagttctggaatttatcatttagatatacttccccatgatactaaatcatgagtgtatgaggttatttattgttgcattcttgtgatagcaaaagattggaaataactcaaatgtccataaatagaagacttcttaaataaatttggtacagacaatataatgttatatggctttaaaaagaaaaaaaaaaaagaggaagttttcaatgtcctcccaagtagccaggattacaggcgtgagccaccatgccgggataatttttgtatttttagtagagatggggttttgccatgttatacaagctggtctcgaactcctggcctcaagcgatccacccacctcagcctcccaaaatgctaggattacaggcatgagctaccgtgcccagcctgctaaggaaagattttgtattagctaggattctccagagaaacagaactaggaaagagggcagataggaaagactgacatattataaggaattgactcacacaattatggagtctgaccagtcccaagagctgcaggttgggttggcaagttggagacccaggagagccaatggtttagttccagtctgagtcccaatgcctgagagccaggaaagtcaatgatgtatctccagtccaaagggcagcaggtttgagaccaaggaagaatcaatgtttcagtttgatcccaaaggcgagaaaaaagctgatgttccagttcaaagaccaccaggcaataaaaattctctcttatttggggagggccagcctttttcttctatttaggtctcaactgactggatgtggcccactcacattagagagggaaatctgtttcactcatctgctgatttctttcttttttccttttgtttttgaaatggattctcactctgttgcccaggctggagtgccgtggcatgatcttggttccctgcaacctccacctcccgggttcaagcgattctcctgcctcagcttcctgagtagctggggttacaggcaatcaccaccacgcccggctaatttttgtatttttagtagagacggggtttcgccatgttgaccaggctggtcttgaatgcctgacctcaggtgattagcccgcctcggcctcccaaagtgctgggattacaggcgtgagccaccgtgcccggcctcatctgctgatttaaatgttaaccttagccgggtgcggtggtttacccctgttttcccagcactttgggaggccgaggcgggcggctcactcgagctcaggtgttcgggtcaacatggtgaaacctgcctctactaaatacataaaaattagctgggcatggtggcatgagcctgtagtcccagctactcaggaggccgaggcacgagaatcacttgaacccaggaggtggagggtgcagttaactgaaattgtgccactacactccagccagggtgacaaaacaagactcttctctcaaaaataagagtaagacaaatgtgcatgtttgtttatagtcacataaagtcattccggaaggatacataaaaactaaagatagaggttccctattagagatgtgctgggaataagaagacttttcactttttatgtgttttttttaaatcatatatatgttttatctattcaaaacattaagtaacaaagtttaaatacccttgcatgccttcctctcctgtagggttgtgaacactggagggaacaaatcatgttttatactcacttttgtattcctggtatttagtacatagtaggtactcaataaatagaggaaagaacgaatgaatgaaccagaagatagcagatttagtgtcggttagagagaggagaggggccaggcacagtggctcacacatgtaatcccagcattttgggaggctgaggcaagaggctcacttgaacctaggagttggagaccagcctgggtaacaaagcgaaatcctgtctctacaaaaaaaaaaaaaaaaaaaaaaaaaaaaaaagcccaggagcagtggctcacacctgtaatcccagcactttgggaggccgaggtgggtggatcacctgaggttagcagttcgagaccaactaggccaacatggtgaaacaccatctctactgaagatacaaaaattagttgggcgtagtggcaggtgcctgtaattccagcaactcaggaggctgaggcaggagaatagcttgaacctgggaggcagaggttgcagtgagccgagatcatgccgctgcactccagcctggatgacagagtgagacatctcataaaaaaaaaaaattagctggatatggtggtatgcacctgtcctcccacctattctagaggctgaggtgtaaagattgcttgaacttgggaggctggggttgcagtgagccaagattgtgccactgcactccagcctgggcgacagagtaaaaccctgtctctaaaaaagaagggagttagggctgggtgcggtggctcacggctgtaatcccagcactttaggaggccgaggctggtggatcacctgaggtcaggagtttgagaccagcctgaccaatatggtggaaccccgtctctactaaaaatacaaaaagtagccgggtgtggtggcgtgtgcctgtaatcccagctacttgggaggctgagacagaggaatcacttgaaccagggaagtggagagtgcagtgagccgagatcataccactgcactccagcctgggtgacagagcaatactctgtctcaaaacaaaaaaaaagaaagaaagaaaaattttttaaaaattaaattaaaaataagggagttataatcttatctaatgtaatcacaaaagttgacatcctatcacatttgctgtattctacttatcagaagcaagtcactaagtccagcctacattcaaggaaagggtacacatgggggtgacgtccaggaggcagggattactgggagccacgttaggagctgtctactacaaggaggaaaaagcaatgaaaggatgaaatctaggatggtggttatctctgagtggaagcaagggggagagatgcaagaagcacatggccggtgaaagttatttgtaataattccattcttggggcaggtggtggatttataggtgttcataagtgagttgattatggacaaatggggagagagtgtcatgaaccaaggattatatttagtccaattcagtaatatttaaaatattcaataataaatgaaataaaaattgccaactactcctgaccttgttctgagccccatccatgcactccacctggtcttagtttaacactggctccacctgaccctccacttgccccaaactaaccgttagcccttcacacacactgacccttgctatagcaccacgatctctccatagtctgcaataggcccccggagttctattccctgaaacttttatccatgtaacctcacctgtaggctgctatatgtaaagatagtaggaatggctgatggagtggcccgaggaccaggagacagggcaggctaacagttctgccttagcagtagcactgtgggcccagaagacaggtttgatggctggtatcacgacctcacctattggcctcctacatggcaaaggctgggccaggtcctgatggttcttcctctttgaggcttctgctcctggtatccagatatagctaagtctgtctctgagaagtgcacctctgccacagcaccaggcctgtaactcccttgttggtaatagactctatcaactctctcctttcctgtctttgatgaagtaagctaccatactggagatggctatgtgtcaaggaaatgagagtggctattggccaacaatgagtaaaacactgaagctttcagtttgacagcccactaggaagtaaattcagtcagcaaccaagtaagcctggaagcctggatccttcctcagttgtgccttcagatgagactgcagttctattggccctttgcttgcagccttgtaggaaacattgaagtggaggacccagccaagcctggcctggactcttgacccacagaaaatgtgagatataataataagtatttgttgttctaagctgctacattggtgataatttgctacacagtaagagataatgtatacaggttcttttcatttcttttgctattacaaagagtgtttctgtgggccaggcatggtggctcacgcctgtaatcccagcacttttggaggccaaggcaggtggatcacttgaggtcaggagttcgaggccagcctagccaacatggtgaaacctgtctctaccaaaaatataaaaaattagccagatgtggtggcatgcacctgtaatctcacatacttgagaggctcaggcaggagaatcgcttgaactcaggaggtggaggttgcagtgagccgagatcgtgcaattgcactccagcctggacgacagagcaagactccattttaaaaaaaacaaaaccaaacaaaaagagtgttgctatgaacgttgttgtaacatgtctcccagaacacagaacacaagagcctaggtttcccttgggtatgtgctgggtatatgcctaggaatggaattgttagatctcaggatgtttgttttgttttgagacagagtgtccttctgttgcctaggctggagtgcagtggtgcgatcttggctcactgcaacctctgccccccagcttcaagcaattctcctgcctcagcttcccaagtagctgggactacaggtgcccgccaccacgcctggctaattgttcgtatttttaatagagatgggttttcaccattggccaggctggtcttgaactcctggcctcaagtgacccacctgccttggcctcccaaagtggtgggattacaggcctgagccaccatgcccagctggatctcaggatttacaaatgttccacattactggtagtcagaaaaccattaaagttagggtcatgccatggctgtagtgtgttggccagggttgggagtaaagcctggcctcaatccatggaagttgggattgtctgtgggcagggttggagtcgtacagagggccgagttaggggtcagtccttacgtagggttgagggtgagtgtgtggccacatttgggaacaatttgaagtctggtttggggttgggtttggacaaggttggagaacactgtgagggtgggtttgggggtcaatctaaggccagggttagaagttaggctgtcatcctgtgcaaaacctgacccctggtgatatcatcaacctaccaagctgtggccgcacaggacccagccacccacaagatgagatccactctgggtccagaaagctctttcactcaaggcgggggtggggagatggaggacaagtgaagaagaaactggctcccctcagatgcaaaaagagaaggcaggcacaggaaatagaacacaacactgactttaatggggcagccctgagccgtaaccttcaaaccttccgcctcagtaccccgtgcgcgaggagggaggggcgactgctacgggcacatcgtcgatgtcctccctactcctggcgatcccacgcctcaccccttcctctccagctgctgcggtctccgtcgccgaggtgggtcccaggtaagctcccaggaggggcaggggagcccctcagcggcccgggacagattcccccatggctgagggcatggggaactagcctggatggagacgccgccgtcctcggagctgggcggggacctgattctgggggtgtggacagagccaagggaccgccccccaaggcccagcgccgggagatgcaaggccgggcccaaggtgttggacactgctttgggggacaggctaggtctctgcacgtggcttctgggctctggaaagcggtccattctcctgacccggatctccggagtggtaggaggcggctcagtcccgggcctgcgctcctagagttcctgtcccatctcctcccacgctcacccatcccaaggaaggagggcactcgggccccagcaggctcgtgagagcagcgggctccgccctcccaatggtctatccatcggtgggtgggtccggcgcggcgtcggggctctggcgggtacccgggcgtccccgcgcggcccgggccgccgctcaccgctgcttacgctccgcctgctggagccgccgggagaggtcttcgatccgcacattcttgagctggagcaggtgctccaggcgccttaccttcatctgcaggacctaagccgcaccgcgcaggcgtcaagcctggcggtctgctccctcctgcccggcctctgctggccgcgagcccccacccgcagccttcctagacccctcacctgcacggtctcttgagaggccaacagctcctgctccttttcagcgatctggaggacgaagctggggtcgccctgcaacgcccggttatacgctggaggccgaggcgccggcggccggtcccagctggggtgggaagcagcttagcggaggcttggacctcgggccctacactcacccttccagggccctcgaccaggccttcccttctccccctctagcccctttcctgcctcccgtctcaggctcagcgtaccgtgccccccaaccccagctgtgtgcagagatcaccagcctggtgaagtctggaactcccagcttctttacctgagctgaccccctccctgggggtccgggacaccttcacctcgggccttctgggatacacctgagacaaggcaagtggaggaatgactgtgctggagtctcattctcctgcttccccctccctacttccactctcacaagtgacaggaagaaggacagaaggaaagctccaaccgggagggagaaatggaaaaggccaccttacccacatccatgtagccactgccatcctggggagccagctcctgaaagaaccccgggggtccgctgtaagcccgggctcagtcatccccaaggagccccatgtcccttccacgggcccccaggccaggctctattagccaagcacccctcccccacacttatcacccaggctggcctttctgtggtctggggagcgccccccacccagcccccagagcagtgggagaagctggagcggggtggcacctgtaaggagccggcgccctgcttcctgcgcctctgcctctcctccaggcgctgcctcagcgggatgagcaccagctccaccacgcctggggcgcactgcgcgatcttgcgcatcacgtcatccggtactgaaaagttcagcctcttcagtaccttcctgaggggtagacattgggatagcagattgggtcctggggaaatgaagcgaggggatgggggagagggaagggggcatggtggttgctgttctgagtgtacagccctgggggagtgaaagcgcatcgcatctgagcttccttgtgtgggtgttccgaggttccttgcctccttcctaatagaagagtctcttgattttgtaatcggacgaattctgtctgcgttgaccctccccaccctgccaccaaaacagtctcagcctgggcaaccaagaccataggagatgatggggctgcacaggtattctgctacctgttcagatgaccccagttgctgagcttctgctggagagagttggcggggacataattgtgcatctccaccatcttggggaagtaaaacttgatgacctctgcaacaaggactgagggagaggggagcagacatggaaagtgggggcatgggtaaggaaggaggaggtgagagaaggtgggggtgggagaatcaggcatggcagagtggtggaacccaatggaggggtggagatgcggaaaggggaaggataaggagggagacaaagacattaagattagtgataggtagaggagactaagtctccagcatacctcagaggagctgcatcccttccccactaatttaggaatgggaatactgagtctctggtcctccagtagagaatgagtcagccagtgcaggggctcacacctgtaatcccaacactttgggaggctgaggcgggtagatcacctgaggccaggagttcgagaccagcctggccaacatggtgaaaccccatctctactaaaaatacaaaagttagccaggtgtggtggtgcatgtaaacccagctacttgggtggctgaggcagaagaatcgcttgaactcaggaggtggaggttgcagtgagctgagatcatgccactgcactccagcctgggcgacaagagtgagactctgtctcaaaaaaaaaaaaaaaaaaaaaagagaatgagtctccaagagaagctttcaggagcccagggaattcacatggatgcatgatgcacacacacacacacacacacacacacacacacactccaacaccaaagttccaggagagtaaaagactcacgtaagcagagacacatgtgataagatccccctacacatagatacatagggcagaatgtgtagacacatagaacaaacacatgctagacacacataggcacacatgtagaacacacatagacagaagcacaaaaagccacatatgcacacagcctccccaaatatacagatacagagatgcatagaagtacttgacatgaaaagatgacagataagtatttctgtcattgagatcccaggagacattcctagaaacacaaacaccttcacaatcacaaagaaacacatgcacacaagacccccccaaatacaagactaaacatgtcaacacatatgaacacacacatgctcagactcccagaagacatagaacacatagcaatgagtgagcacatacagaaatgcataaatacatatgcagacacatatcttaatcattaatgtccctggagggagttagaggcaccccccccaacatgcacacaggatagaacatgtagacatacatatatggacacacatcgttcacacacagatgcaaatagaaaacaagcacacacatctaaaatttgaagtcccaggaggcagattcctccccactcccacaagcacacaaacacaaagagtttgcacagagacccgttacacacgaacatacaggacagaacatgcagacacacaagggcacacacctccatcgctaaagtcccgggagaggtttcgcttgggccgggacagagggatgttgtctacccacaggtacagctggtgcagcgcctcctcgtccacgctgctcgccattggcgtcctcacggcctggccgccccagcggtgccgggtcccgccccagcctcacgacccttcaggcgcttcctttctcgccactgcagaagcccataactgcctctgcctgcctaatccagagactcacgtcccagctgggagcggccatattgttttctgaaaccatggaaaccattcccgactctcctgggtacaaagacttctgggagttgtagttttatcccctccccgctacctcctctcaggcccgagctttgaaaaggcggttagctgcccttgtcttcttcccaagaaagcatcacttctgtgcccacgccacctagtgaccagccactcatccattttgggaccagccaaagccaaccaggaccccagaattcctgcatctgcacccctagggtggggatcccccttcttggcccttcagccctttagtcccaagtgaagggagcactccagtgttggtcagctttatttgggggtgcgttgttgataatctgccacccaaatggattgcgtgatacaactgcttcctgcttcgtccctctccaaaaactctatgctcatggggccattgccactcgcccttcccagcagtgttctagtggggtatttaataggtaacccagactcccagggagaacaccagagttcaaggccagtaccttggcaggtcatttaacttcttaactctatttcctcctttgtgaaatgacgatggttctcacttatttgtcccaaacccctcatcacccgtcaatgagctattcttccatggattagaaattcatttcaggcagggcacagtggctcatgcctgtaatcccagcactttgggaggccgaggcgggcagatcacctgaggtcaggagttcgagaccagcctggccaacatggctttcgccccgtctctactgaaaatacaaaaaaaagttagccatgtgtggtggtggatgcctgtaatcccagccactgaggaggctgaggcaagagaatcgcttgaacccgggagtcaaaggttggtgagccaagatcatgctattgcactccagcctaggcgacagagcgggactccatctcaaaaaaaaaaaaaaaagaaagaaaagaaaagaaagaaacaaattcattgcagtacccataagggggttaggaatatgggtccctccttagtgaagaggtacttctagagtcaggatgagaagagagtttgactaacggcatggccttgggcacctgaccggaccgctgcctggtttctcatggctttacctaccttataggggctttgtgagcatctaaagcatttagcacagagcaggggccctattagtatcagctggtactatcattaatgagacagtctcagttccagcaagaactgttctttttcgcaggagacaaatggaagtaattcgtcttgttggaacctgcggtgaggtagctgggttaaacaggagcacctgggcaagcaggcaatgctcctcctgctcactcgagagcaggtggggcttccttgtggccttctggtctccaactccagggctcggatttcgggagggaaggtggtggcaagggggatcccaactactttttgttgtcacttcaaagccctcaaggcctggaggggattcctgaatgccagaagtagaggccaagagtggaagtcacccccatttcttgttttaaagtcatatatagtggtcttgattttccataaggggccataaccagggcaggccagggacaagagatgaactggatactcccccattaacattcccagtgttggagaggagaaacttggtggtaaaggtgggccggggatgggaaggaaacacagaagtgatgtgccagcctcaggtgaggtgggaaaaccggtttggggcccagagctgccagccatgctcaagcccaggccctcccttggttggaactgctggggcctgagggcctcagtgaggaggggtagggagggaggggctggctctgaaaggaaaaagggtaggatcagcaaagggacctgacctcacctttgtactgggggccccctggaaggcactgcacagggagttaccaaccatcctctgcctcttgggggtgcaacctgttcctagcaatttcaccttcctcctgccactgtgcctagaggtggccaccaggcttggatatgccaatcactgaaaggcctaaagggctccctcttaaggcaccaaaggtaaaccaaagggtgacctatatgcccctccaaactccaatctggaccccagaagctgccccaacactcctttctttctgtcctgaccccactcctgcaaaggccttcaaaccagcctcggtaggcctagtccccacgtgcatattgatttgcccccagagactgatggctccctcctgccccagccaagtgaccccaagcttgaggtctcctcctgcccctcttccggtcagggcaaccctctcaacacttgcctccatgtcccaccagagcaaggaccaaagagagccaggacgaataagtcccccaagacagacgcaagcccagaccatgaaggatgcacccttggctgttaaaacgttcacccccacaaaaggggagtggacagatttattgaaatcaaactgggaaaggagcagctggacggctggactctgggcccagccccaggcccctctgcccaggatggggccctgccagagagggaggagaggcatggggcctgcagctgcccacaaggaagcgcccttggttacttccacggtggggggcctcttggaaacctccaatctggaaagaaaaccaagggccaaagtcacatggacagggccagagaaagggactggggaggtggaaagcaggcagaagcaggctcaggagcccgcagtgagttaaactgtgcttctcaaggcggcctggggggtgggggtgggggctgccagccttgcagggggcctaggctggaccttcttctggagcccttcccagaatggctttggggtccccccaccaaagacctgacgtggatggcagaggggagaggcactctccggccgggaacctccagggcccatccctggctgctgctgtggttagtccactgagggcacggtgtggtagcaccggacagctccccacccgccccacctggtcccctgagcccagggccaaatggggaggaaagaggattctgagaaagaggcaataagcaggcagtgaggctgacctcagccccgggcccggccgaggtgaccgggcctgttgcaggaccaggggaagcattactaaaggatctggggctctgcactctggctccatgcacagcgggtgcccagagagtcctctgccctggggtggtgctgccaatctaggttgggggcacagctaggtccagtgactcagctttgatgtccaagacctcgaactcccgcctgcctggcgtggttcttcctggtcacatgaaccagatcgtgttccaagtggaggatgtggctctgcacgcggtcatcaatggggaaggaggtcaggtacctcttgaccatggcaaagtaagccatggcctccccaaagctgggtacaggcacctcatcaccatcctcctcatcatcatcgtcgtcttcatcttcatcatcctcttcctcatcgtcctcttcctcactgtctgaatcagagtcctccccaccttccaggaaatgcagagtagggcactgggcttcctcctgggcaccataagccccgaagctgccaccggcctccactactccctgggcccagtcctcagcctccaagccctccgaggagctctcctcatcttcctcctcttcttcatcactatcaacatcaccctcctcctccacctcctcttcctcccccaattcctctccttcccccccttcctcctcctcctcctccccttcctcctcctcttcctctccttcaccctcttcctcctcctcttcttcctcctcctcctcctcttcctctccctcactcttgagggaagtggtgatggtggcattagggccacccccaaagccagcctcacgaaagcaggcggctatgtccgaaggctccactgcctgccaggcggcagccacaaagtgcagggcctccgtgagacccagctgcaggcctgagggatcctggccctctagcgcggccatggccttgagcagcatggcctggcggtagtggcccttcacctgctggaccactcccctctccagcggatgcacggtgccgggagggaagaaggccagctgcacatgccgcaggcccgaggtgtccaaggactgggcagccaagcggccggccaacagcaggacccggcgagactctgcagccattcgggtgtccaaggccttcaagtacttggccagggcctgggtggtgacaccacccttggagttggcggtgtagtcgcagggcaggccggcttggcctgcgcggggcttggccgacttgccggccaccagcgggggcagcttctcgctgccgtcggcattggcgcatagcaggacgctcaggcgctgggtggcttgacgcggccgtccgtcgcctccgcacagccccgcggcctggtcgggcaggaagtcgtaccatagactggtctcggtggcgctgaacacgtcctgcgaggcgtagccctcggccaccgacggcggctgctcctcccgagcgcgccaaccagtagtgctcccgccactgccctccgagggcaccgcggccggactggcaggcgccgccggggtgcggggggcagcgtttcgcgcgcgggcgcgggccacgccgctgcaggacaccacgccgtggcgccggcggaagcggtccagccagccgttggaggcggtgaagtcgtccatgcccagctcctcggctatgcgcagcgccttctccttgaggatgatgcccttgaccggcaggccggcggcgcggatctgctggaaccaggcgatgagcaagccctcgagcttgtcgtagggagacagcttgttggtcttgcggcaggtggaggccaccccgtacttgcgctccgacgccaggatggcgcgcttgttcttcaggatcgtgctcagcgtggacggcgggatgttgaagcgccgcgcgatctcgcccttgcgcaggtccggattctcctccacctcctggatgatccgtgacttctcccggaacgtcagctgtcgcctcttggggcccatcccggcgcgccccccgccccggggcccggcgccgccgccgccgccccggggcggggggcccgggcccgtggcggggggcacctggcggcctctcccgcgcgccccgcccgagacaaagcggctcgcgggcgcggcggcggggcgacgacccggccgggccgggggcacctccggggacgccggcgggcgcgtcgccgggcggcgggcggcaggcgacgggcgcagacgagggcgggcggcgcgggcgcggaaggcaggaagtgccgcggcgcggggagctgggagcgcggcgagcggggcggagcgggcggagcgggatctcgcgggaagcgcggggacgcccggcgcctcctccccgccctccgcgcccacccccttcccgccgccgggacataccgcgggggggcgctgcggcctgctggacctgcccgtgctgcggcctccggcgacccggcagcgacgcgggcggggacgcggtgcatcgctactgcgcccggcggacagcgacttgctgctcaaaaagaataagaaccagggtttttgtttgttttttttttttttaattaaggtaaaaataacgcacttttttttttgcggaacctgaaaaattcaagaagttgaaaaacgcttttcacgtcacctggagagatgcacaggtaacattttgatacatttccttccagtcttttctctagatgcatgtcgttttctttttaaaaatttattatataaaactggcatcagactgtatagactgtatatctggcatctcctgctgttttacctggcatcaagtagtgagaattttgccatatcggtaagtatcattgccaacacgctttttaatgattgtgtagcattccagctatgaatgaacactagcgtatgtaacctattgttacacacttaagttatttttaaaatcagcattacagttgtaaatctatttgatggtgctaatgacatttttaaagttctagtaatcccacaacccatagataaacactcataacatcttggtgtgtcactttctgggcttttccatgcatatagccataaatgtatgtgtttgcacttacagaaataacatcatgtatatacataagtgtgaatccctgaagcctccctctcctgcagcaaaacattaaaatgccaagctcttaaaacaatgaatgtatagctgtgtttttaaaaatctcttagggcagcactaaggggaactccagcattggcagaggggaaggctgtgacccagggggacaggctgaggacctggggctggatgaagctgtgggtgagtgtagacaaagaagaaaagaggaccaaggacagtgccctgggtcctccaaggttaagggctcaagaaagaggccaggtgcagtggctcacgtctgtaatcccagcactttaggaggccgaagcaggcgggaccacttgagatcaggagttcaagaccagcctggccaatatagtgaaactccgtctctactaaaaatacaaaaaattagccaagtgtggtggcactcacctgtagtcccagctattcgggaggctgaggcaggagaatcgcttgagcctgggaggcagaggttgcagggagccaagatcatgccactgcactccagcctgggcaaaagagtgagactccatctcaaaaaaaaagaaagaaagaaagaaagaaccaaatagagactcttgaagtggaggagcccctgaagcaggagaaaaaccaggctactgtggcattctggaagccaaaggaagaaagtgtaactcactgctgttttagtgcaaatttctgttttcgtatgtttcttggccatttgaatcctgtgaattttctagtcatatcctttgaccatgtgtttgtctttttcttgacttttaggagctctttacatgctctgaagaaaagatcttgttaagtatgttgcaaatgttttctccctgtctgccacttgtctaagttagtttagggaatcttttggatatgagaagtttttaatcttcaacctgtcaattttttccttattgcttcggggttttgtgtcttacttagagaggacttccctatccctgagatataaaagatattcttttaatctcaaggtccaaaagaacacgtgggagacttttccagagcactgcttggcccaagaggagtgtgtggtcactgggcaaaaatgaatctaagattacctggatgagaactccttgccatgcatcttttctttctttcctctctttcatccttttccttgtttctttccttccttccttcccttctttctttctctttctctcttttccttcctttccttctttctttccttccttccttcccttctttctttctctttctctcttttccttcctttccttctttctttccttccttcctttctcttcctttcctttcctttcctgtggcccctccttagtgccatacaaagggcattggcacaattacttctaggacagaaaagccacgcccatcatatgctgatgtcatagccatttccagatacctcgtctaccctttgcctgtagcagtgcacggggcccatttccatcccctctcaagtgaccatttcccccagcaatccatctgaggccccgggcttccccacctctttctgtaagtcccagctttctgcttttaggactgtttgggaaatccataactcaccttctcttcttttggtccagcctgcccagagctgtccttcaggcccctcagcaagctttccattctccttttgtttatttgagacagggtctagctctgtcacccaggacggagtacagttgcacgatcatagttcattgcagcctcagtctcctcagtagctaggactacaggcatgaggcaccatgcctggctaatttttaatttttttttttgagacggagtctcactgtgttgcccaggctgggagtgcagtggcgtgatctcagctcactgcaacctcctcctccctggttcaagcaattctcctgcttcagcctcctgagtagctgggatcacaggtgtacaccaccatacctggcttagttttgtatttttagtacagacagggtttcaccatgttggccaggctagtctcaaactcctgacctcaagtgatctgcctaccttggcctcccaaagtactaggattgcagccgtgagccacctcacccggccaaaaaataataataaataataaaaataaagagaacaacattgggcgcggtggctcatgcctgtaatcccagcactttgggaggccgaggtgggcagattacgaggtcaggagatcgagatcatcctggctaacacggtggaaccccgtctctattaaaaatacaaaaaattagccgggcatggtggcgggcgcctgtagtccgagctactcaggaggctgaggcaggagagtggcgtgaacccgggaggtggagcttgcagtgagcggagatcgcgccactgcactccagcctgggcgacagagcaagactctgtctcaaaaaaaaaaaaaattagctaggcatagtgccttgcgcctgtagtcctagctcctagggaggctggggtgggccggaggatcacctgagcccaggagcatgaggctgcaatgaactatgattgcaccactgcattacagcttgggtaacaaactttgttttgaaagaaaggaggaaaaagaaagaaggaaagaaggaaggaaagaaaaggcagagattgcagtgagccgagattacggcactgtactctaacctgggtgacagagtgagactctgtctcaaaaaaaaaaaaggttttattaagatatatttcaagaagcatacaattcacccatttaaagtgtacagttcacagatgtgctcaactgtcaccacagtccattttggaattttttttttttttttttttgagaccaagtctcactctgtcgcccaggctggagtgcagtggctcaatctcggctcacttcaacttcaacctccgcctcccaggttcaagaaactctgtctcaaaaaaaaaaaaaaaagatttgcttaaaagttaacatctcgggctgggcacggtggctcacgcctgtaatcccagcattttgggaggccgaggcgggtggatcacgaggtcacccaggctagagtgcaatggtgcaatgtcagctcactgcaacctctgcctcgtaggttcagtcatttctcctgctcagcctcccaagtagctaggattataggcgccaactactatacctggctaatttttgtatttttagtagagacagggtttcaccatattggccaggctggtctcaaactcctgacctcaggtgatccacctgcctgggcctcccaaagtgctgggattacaggcgtgagccaccgcacctggcctaatttttgtattttttgtagagacagagtttcaccatgttgcccaggctggtctcgaactcctgagctcaagcgagtcttcctccttagcctcccaaagtgctgggattataggcatgagccaccacccacacttcttttactctaggaaacttgttcagaagtccatttgctatgatctcaacatgtagtctttcaataatgagcccctaccaagcaggcatccccacctgactgcccgttctccttaaaggttgcatgtattgcacagtgcaaaggaatcacctcccctattgaagacaataactcaacgaacatacatctgtgtgtacttttatcatctccttaagagaaatgctgagaagtgggatattagggtcaggggccaactttggtcttgaaccaaagttctgggagcaaggttctgggagcctgggagagaggtaaatgatttagtccttgtccttcaatagtccagtcagcttgagatgagattcaagaaagggaaaaggagatttcaatacttaatgctactgggtgtggtggctcatgcctgtaatcccagcacttttggagactgaggctggtggatcgcttaagcccaggagttcaagaccagcctggggaacatgacaaaacccagtctctccaaaaaatacaaaaatgtgccaagcatagtgggatgcgcctgtagtcacagctacttgggaggctgaggtgggaggattgcttgaactcaggagacagatgttgcagtgagccgagatttaacactgccctccagcctgggtgacggagagacttggactcaaaacaaaaacagaaaacaaactaaatgctgtgcctcccatcagttcctccctaggaattcatcttgtagatagcacacagacacataagggcatacttactgcatcgttgtaaaagctaatatcctaaatgttcagcattaggggcttgagtaaatatatattgttatggtactaatatggatccatctccaagtaagaagaagaaaggtatagaacagtggtttttatttttatttatttatttatttttgagacagaatctcactttgtcacccaggctggagtgcagtggcacgatcttggctcactgcaacctccgcctcctggattcaggtgattctcctgcctcagactcccaagtagctgggattacaggcacatgccaccatgcctggctaatttttgtatttttagtagagacagggtttcaccatgttgcccaggctgatcttgaactcctgacttcaggtgatccacctaccttggcctcccaaagtactgggattacaggtgtgagccagcatgccagcctagaacaatgttcatatgctgtttgtatattctttaaaatacagacggatttacgcttgtaaagatatagacctgcagccactaaccctaagtggccattgaactattaatttatttattttatgtttagaatcaaagtctcactctgttgcccaggctggagtgcagtggtggaattatggctcactgcagactcaaactcctgggctcaagctatcctcctacctcagcctccagagtcacttggattttttgtttgtttgtctgtttttgagacggagtcttgctcttttcgcccaggctggagtgcaatggcatgatctaggctcactgcaacctccgcctcccaggttcaagcgattctcctgcctcagcctcccgagtagctgggatttcaggtcggtgccaccaggccaaactaatgtatgtatttttagtagagacaggttttcaccatgtcggccaggctggtctcaaactcctgaccttgtgatccacctgcctcggcctcccaaagtgctgggattacaggtgtgagccaccgtgcccagcgagtcacttggattataggcaggggccaccacaccgggctaagtttttaaaaaatgttttgtagagacaaggtttcaccatattgcccaggctggtcttgaattactagcctcaggcaattgtcctgcagcaggctctggagttgctgggattataggtgtgagccacagtgccagcactattgagccctttaaatgttgcaagtacaaattgagatgtgctgggggtgtaaaatgcatactagtttgaagacttgatatccaaaaatgtaaaatatctcattaatttatattgataacatgtcgaataatattttgaatacattacattgaataaaatattacagtaatttcatgtttcttttttactgttttaaatgtggctactagaatattttaaattatgtatgtgggccaggcgcagtggctcacgcctgtaatcctagcactttgggaggccgaggtgggtggatcacctgaggtcaggagttcgagaccagcctggccaatatggcaaaaccctgtctctactgaaaatacaaaattggccaggaatggtggcgggcacctgtaatcccaggtactcgagaggctgaggcaggaaaatcgcttgaacccaggaggcagaggttgcagtgagccgagatcatgccactgcactccagcctgggcgacagggcgagactccatctcaaacaaacaaacaaaaaaacccagaacccctctgtggtcttgcccacctcccccctcactggcccagaggtgacctgactgtgggatttctgtttttttttttttggttttagagaattttattttattttattttatttttttattttattattattatactttaagttttagggtacatgtgcacaatgtgcaggttagttacatatgtatacatgtgccatgctggtgtgctacacccattaactcgtcatttagcattaggtatatctcctaatgctatccctcccccctccccccaccccacaacagtccccagagtgtgatgttccccttcctgtgtccatgtgttctcattgttcaattcccacctatgagtagaatatgcggtgtttggttttttgttcttgcgatagtttactgagaatgattatttccaatttcatccatgtccctacaaaggacatgaactcatcattttttatggctgcatagtattccatggtgtatatgtgccacattttcttaatccagtctatcattgttggacatttgggttggttccaagtctttgctattgtgaatagtgccgcaataaacatacatgtgcatgtgtctttatagcagcatgatttataatcctttgggtatatacccagtaatgggatggctgggtcaaatggtatttctagttctagatccctgaggaatcgccacactgacttccacaagggttgaactagtttacagtcccaccagcggtgtaaaagtgttcctatttctccacatcctctccagcacctgttgtttcctgactttttaatgattgccattctaactggtgtgagatggtatctcattgtggttttgatttgcatttctctgatggccagtgatgatgagcattttttcatgtgttttttgactgtgggatttcaagggattcaatagtataatgcctgccctgccacatacaccctgtgcagatgtatattggctgggtggggggtgggggggatacctgttgtgtttattttgaaaatgcaaatctcggggcagttttttttttctggtttttgggctgggtggctttacaaggacacttcccccttccctcctggcactaagggcagtcacatcctcactggaagtagtggctggaggtccagggcataacccctgacccagggaggatgaaccggaaattcagtcttgcagagccctctgcacagcacaggagctgggcaaaatttggagaaaaggaaaggtcacgttcccaccttggccacccctctcaggtggggctggggtcttcccctacccttcagatgcattggcccacccagccccccatcaccaggccctcccttttgccacccccatccaatgcaccttgggtctgggtggctgggactgcacgagaaggggtactcctgccttgctgagctgcagcccgccccccgcaccaccacccgcccagccagaggccacttctaacctggggagacaggatgcgaaagctgctcactacccaccggcttttgggtgcagccttcaggcctcttgttccaggaggcctggaaaacgagcggggctggaaggcatttagataattggaagatgggccgggcacagtggctcgtgcgtgtaatcccagcactttgggaggcctaggtgggtggatcacgaggtcaggagttcgagaccagcctggccaatatggtgaaacccccgtctctactaaaaatacaaacattagctgggcgtggtggcgcgctcctgtagtctcagctactcgggaggctgaggcagaagaatcgctggaacccgggtggcggaggttgtagtgagcagagatggccactgcactccagccgggttgacagagggagactccatcccaaaaaaaacaaaacaaaacaaaaagaaagataattggaagctgctccgcttaaaacgaatgacaaattcagcctccctggtctggtcatcaaagaaacaccaattaaataatatggtgccattggcaccaagttagccaaatcatcaatgggcgtgatacttaattcgcctctctggttgctgacaccctcctcgacccccagccgcggaaatccattcctagttccaccgtttagagcctctcctggggctgccgcgaaaattgggccggttggggtaacatctaacctggggtcccgcgaaagagcccatcagttccgcttgggggccccactgccctcccacctcctacgctgggcgcttctcctgcgaatgacgttttgctgctgctcagcgcagccagtcgcggaggcggggaggctgcgcggtcagaggcgcctggagcgagcgaatcctggcccaccgcctgcccaaccgcgtgaccttgattgagttaatgaacttcacgcctcagcgtccaggtctgtaaaatggggtgtctaacgcagaccgtacagcccagctgggtttagcaaacttccgggagccagttggagcctctccccatccctagcggtgatcccaggtgacgacatgccgcggggggtcctgcggaggccaccctagggcgttgctgctgcctttgggagtgtggagctccaaaccatgtcgcgagaggcggattttgggaggccgggatcctcgcgccagggggatgtgcgagggtgtgggataaatcttaattcctccggcccacccaaagcctggaaatccagcctccgcgcctcttgccctgcgggccccgccctcagtcccgccctcatctaacccgctaccccattggtggcgtccggcggcgcggctgctgttatttttcgaatatataaggaggtggaagtggcagctgcaactagaggcttccctggctggtgcctgagcccggcgtccctcgccccccgccctccccgcatccctctcctccctcgcgcctggccctgtggctcttcctccctccctccttccccccccccccacccctcgcccgctgcctccctcggcccagccagctgtgccggcgtttgttggctgccctgcgcccggccctccagccagccttctgccggccccgccgcgatggaggtgccccagccggagcccgcgccaggctcggctctcagtccagcaggcgtgtgcggtggcgcccagcgtccgggccacctcccgggcctcctgctgggatctcatggcctcctggggtccccggtgcgggcggccgcttcctcgccggtcaccaccctcacccagaccatgcacgacctcgccgggctcggcaggtaggacaccccaaggaggctgcatatgggggtgagaggctaggtctggagtcctgggcctcctggagaactgggcatggtagtcgaatccaggaggtggagtccggggaggcatcctgagcagtggagaggtacgcccttgttccctcctaggggcccaggacatgggaagtgagacctgggctgtgccccccacacctccaggtgacctgctctcagtctgcacaagcctctccaaatcttctttcccctcactccctcctccctcattgtgcctccaccacgctgcctccgtaatctctgcccggatagccaccattttgccccaggatgggaatctcaagcctggagagggaacttaagggtggcagagccgtggagcactcacacatccatgcccctgctccctccaccccagttctgcccccagaattaagacaattaattaaacactgatcctgctccctaagtctgcaaggggagagctgggttgttccagtaggagaacctggtcttggtccatccttcaggaagggtcctggaaaggtgggggtctgacagtttaggggaaggctctctggggcggctctgctagaccaccaacccttaggctggcctccagccaggcagccttgctcacaccctgggctcaccttgccctgctcctgagaggacctttcctaaaccagtcaacgaagagaagacgctttagggcctctgtagaatgaaccttccttgacctgagaagagggggccctcagggccattgctttcccggtgtagtgtttcgctcagttcttttctcagcaagggagtgggaacgtgggctagccaggccttgagccccacgtttacctttctcctttcccgggtccctgttcccttcccagcgaaaccccaaagagtcaggtagggaccctgctcttccgcagccgcagccgcctgacgcacctatccctgtctcgacgggcatccgaatcctccctgtcgtctgaatcctccgaatcttctgatgcaggtgaggcccaggggagcctggggagatctgcctgtgtcaggagagtttgtgggggctgcctgggcctcccaatttccctgccgatcaaactaacatcctccccacaacctggtgggcccaggagcctctcccccaccctccacagaaatgggaggaagacacacctcttgtggggctcaccacacccaacgcggactggctgagtggatgagagggtggggccctctacggagatgagatcttacctatgtaaaaccacgctccagagttcctaaaccacaaccctacctgggaagcacccagggctgagagttggtctttaaaacattcttagcctataacctcttctttaaaaatctgttgtctcttctagaacaaattattttaaaccagttcaagaaaaatgcttagtgagcattgtggtttaaagacgcatatgaaggaatttccatagtaaacagggagtggagccctgtaccgtctgggggacgatgtgtcagctctcagggtccatggttgggtttttgtttcattttctaatgtgtcaaagtccaaactagaaactgttttttttttttttttttttttcatattgggacatggtgggggaaagaatacagaaagtgccactactttcaaaccaaggtgctctgtcccctcaggtctctgcatggattcccccagccctatggacccccacatggcggagcagacgtgagtagagaagggaatgtgtacttccaagcattcagcacctgtctttaagaatcctagttctaccataaattcacccgggaggcctgggaaagcagacagaccatggggtggcttcaggatccccatggccggggggctcactgactttctcaggccttggcattctgctccctgtctcagagaaggatctgctctcatgggagccaaccgagtgtgggctcagggccagggatagtggggacagtggccactgggagagcagatactagactacagcccatgtcttgcaggaatacaagcccagcgtatgtcccgtttttctttcttgcctatacccatttttttctgtgaaatattacaatttaaaaatatgatccaactaattcaaaactttaactcactctaggccaaacaaaacacagttgcctgcagattgatttggctcttggccgatcagcaacctctgacttcgatgacactttaccctctggccagccctggtctaggccctttctgcaagggaatggagagagagttggtgggctctggcctggacagaccatccccttggctgtgggcatgggtggtgtcttccagagcacagctgttcccatccagttgttaaagcccaagcagcggggcagctgccagccattagtagggacagctgggcatctctggcctgtgctggggactgtggctttgggtttaggatagtgacttgtcttacctcccattgcctttgatcagactgggttgggctgcagattggttcacaaacaggaaatggggagaggattgggtggggttgggggactgcaggttggttttggtggcagcacagagcaatcttgccctacccccaaggcccatgtgcaagccaatgaaattggtcatccctgatgccaggttggctgggcacagcagccccccgggggggcatccccctcatactttatccctgagtggttccctgccctgcacctgctctgacagttatacagagtttctcagaagctgtgtgtgtgtgtgtgtgtgtgtgtgtgtgtgtgtgtgtgtgcgcgcgcgcgcgtagatgcacaaaagctccgcgtggcaggtggtctcctgtaacacggctgagggggcggggcctcagagggaacatgtgttggaattccttgcctgctggcctcttctaaggcaggaggagggggtgggacagaggctggtcctggaaaattccataggagggaggagaggatgtgagcctgcacgtttgtcactgggggtctactgtatcagactggagctgactgggggagccctaaagcaggccccagtcctcagaggaccgggagccaggccagctcctcacaggggagaggaagcctagccttgctgttgtccaggccctggagacacccacattgctgggtgcccctggcctatcataggatggatggatgcctttcctggcagccatatggccccgctgaggtgatttgcatacaggtggaaggcctggtgcaggctggcgagactgttgccttggtgacgcctccctgaccctgacctgccccagctgtctctatcactgccattctctgggctttctttcattcagggcagcctttaaaattccaagctgcctcttatcttccccctccccaatacctgggccccctgatggtgggcgttcttcccaccccaccccttccactgccttgagccttggcccttgtctttgcccttactcccccctggactgggggcctggtgctggggtgggtgatgggtgcggagggagcatgggttgcatgggacccttctctgtcctaggtttgaacaggccatccaggcagccagccggatcattcgaaagtaagtgttcctgggcctcttccatctaccacaagctttcccttaggacagggctccagaagggcatgctgcatgctcttggtccctgccctgcctctcccagctctcacctgtccccatttcctcctgtagcgagcagtttgccatcagacgcttccagtctatgccggtgagtgtcttcgaggcctgactgaggcttaggcatgctagccaggcatggggtagatgagcaggatgcattcagggatcacctcccagctgggtgtccccaggcaggctgtaggagatggggtttcagaggtaggtaggtaagtgggaggagctggaggagaggtggagaaggtagggcctgggctcgtgccggaggaatgcagccttcattcctctgcctgccgccctgcctggctctctaggtgaggctgctgggccacagccccgtgcttcggaacatcaccaactcccaggcgcccgacggccggaggaagagcgaggcgggcagtggagctgccagcagctctggggaagacaaggagaatgtgcgcttctggaaggccggggtgggagctctccgggaagaggagggggcatgctggggtggttccctggcatgtgaggaccctcctctcccatcttggctgcaggatggatttgtcttcaagatgccatggaagcccacacatcccagctccacccatgctctggcagagtgggccagccgcagggaagcctttgcccagagacccagctcggcccccgacctgatggtacatccagagagcggatccctgggaggggcctggggaggcagcctcggagaagaggagggtggccctgaacccccaggcactgggaacttttcctcaggaggatgggggcgggaactatctccacctctaagtctgtgtctgtctgtcatgtggacagtgtctcagtcctgaccggaagatggaagtggaggagctcagccccctggccctaggtcgcttctctctgacccctgcagagggggatactgaggaagatgatggatttgtggacatcctagagagtgacttaaaggtaaacagccttgtcccaccaggcccctaccttcctatccctgggttcgcccaaaagaagagagctctgagcccttgtggcaggaccatgatgtcattccagtgtcagaagaagaatctgaggtaactgagtcacagcctaacctctggccaatgagagaagaacaggtggctggtgccacagtggagggcggtttgggaggtaggggagcttctcaccccaacctggagtttgccagggaaacagggaaggctgtgctggaggattccgggactggaggggtttggcctatgcctgtgggttgtgaccctgtccttgctaatctggcctcaggatgatgatgcagttcccccaggcatggagagtctcattagtgccccactggtcaagaccttggaaaaggaagaggaaaaggtgggcctctggggtggccccctccgaatttggaggcatggggtccatcctactctccagtggatttgagggatgggacggggcctgggcaccctgatccctaacctgctgtccctgccaggacctcgtcatgtacagcaagtgccagcggctcttccgctctccgtccatgccctgcagcgtgatccggcccatcctcaagaggctggagcggccccaggacagggacacgcccgtgcagaataagcggaggcggagcgtgacccctcctgaggagcagcaggaggctgaggaacctgtgagtgccttcctcctggggttcactttggcatgcacctgggcagccacccccttggctaagtttgtggcagagggcaggtggcagcctgggcatggcagagaaagggggtaccagccagccagagcactggggggcagccccaccctgaccctggcctccatctgactcactttccagaaagcccgcgtcctccgctcaaaatcactgtgtcacgatgagatcgagaacctcctggacagtgaccaccgagagctgattggagattactctaaggtacctgcagcagcgaagggggtaccttgggggcttgacctcttactgactaggggtcctctagcccaggggctgcttgggttcctccctttctccccggagccccccttttctttgtcctttgtatcttttcatcctttgttctcacatagactcctccctctggccctccttgtctcctgactccacctcaagtcagtccaggcatctgttgagtctccgtcttatttccaagctcatacctagcttggaaccccctcatgcctcaccttcgggcttggcagagggtagggagcagagtgtggagttcatctcttccacttccctttttcatttctctttccccttggaaggttgttccctgggtgtcagacccaagaggtgcctctcagttgccatgggaaccagaactgaatttgaaggccaaagcaggtgtggcctctgattttgggaatgaaacttcattctttgaggctcctggtcttaccaatttaactttctcccctctccctcatcccttccgttcccttcaggccttcctcctacagacagtagacggaaagcaccaagacctcaagtacatctcaccagaaacggtaaacagcgttgcgtcattttctaggcagatttgggactgtagctccattgttgaccttccctggggacaggctagggccacctgccagctgccagcctgacctgccggaaccaacccccatgacctcctacagatggtggccctattgacgggcaagttcagcaacatcgtggataagtttgtgattgtagactgcagatacccctatgaatatgaaggcgggcacatcaaggtaagatggggcaatggggagaggccctgaagatcccacctggtttaggtccttgctttgccaagagggtgaatgggtggaggacgggtgccccctctcatggggagggttcctactaagagaaggacagcgactgcacggggagggccctgactcctggacccggggctgtgcctgacctctggctcctctgacagactgcggtgaacttgcccctggaacgcgacgccgagagcttcctactgaagagccccatcgcgccctgtagcctggacaagagagtcatcctcattttccactgtgaattctcatctgagcgtgggccccgcatgtgagtcccagctccgcccagccagctagtgtctgccctggccttccctgcccaggctcacaggtgctggcaccattgagatggccaggggtgcaagtccaggtcctcctctgtcccatctgatggcctagagctgacctcagccccacttcactgtgcatggtacccgcctcccatctccctcactgtcctgcctatcaagcctcatgtccaccccacatccattactgccaccctcagaaaatttagttccaagtctctagcggtgtcttttctcgaaatctaagggccgcgtgtcagtccccagtacacggaccctccccatgttcagtgctgttaggtctccattagaacctcttccattggcatccacagcacctgggcctccctggctgagctccttctgtcgctattcctgttctgcctggccatctgtcctcccacccctgcctcctcctgggttgccactggtccatatgactgctagtggctccccagcctggcctcacccatgtggtgggaatctgcacccagacgccccttacagagtcgcatccctgcggccctcccaacttctccaggcatcccagcatatggcacccacctccacctgggcaccgggcctgggcactggcttcagtcttgggtcctcctcctcccttctccccaccactgatcctcaccaggtcttgtccaggagtggcccgaatggatcccttgaatttggcccacttgtctcctctcctgcttctcctttcctggtccaggcacagatatctctaacaaagattgtgcaactgccttctagaaacggagagttcatccccttgattttacctccttccttccgcctccccaccctcttctgtagccagagtgacctaaaagtgttcttgtggttacattcctgtgctctaaagctttctgtggctccccaaggccctcaaaggaggggacgtgggggataggtcccatgatgtacaagccactgcatgccccactctgaccacaccctgcccatgacgccccaggtgccgtttcatcagggaacgagaccgtgctgtcaacgactaccccagcctctactaccctgagatgtatatcctgaaaggcggctacaaggagttcttccctcagcacccggtagcgtgggtggggaaggccacagtctctgtgtgagggttggcttggccaggctggagccatgggatggggggtgggagggttgggtccctgccaaacttacccattccactgcattgacccctcctgtcctgccctagaacttctgtgaaccccaggactaccggcccatgaaccacgaggccttcaaggatgagctaaagaccttccgcctcaagactcgcagctgggctggggagcggagccggcgggagctctgtagccggctgcaggaccagtgaggggcctgcgccagtcctgctacctcccttgcctttcgaggcctgaagccagctgccctatgggcctgccgggctgagggcctgctggaggcctcaggtgctgtccatgggaaagatggtgtgggtgtcctgcctgtctgccccagcccagattcccctgtgtcatcccatcattttccatatcctggtgccccccacccctggaagagcccagtctgttgagttagttaagttgggttaataccagcttaaaggcagtattttgtgtcctccaggagcttcttgtttccttgttagggttaacccttcatcttcctgtgtcctgaaacgctcctttgtgtgtgtgtcagctgaggctgggggagagccgtggtccctgaggatgggtcagagctaaactccttcctggcctgagagtcagctctctgccctgtgtacttcccgggccagggctgcccctaatctctgtaggaaccgtggtatgtctgccatgttgcccctttctcttttcccctttcctgtcccaccatacgagcacctccagcctgaacagaagctcttactctttcctatttcagtgttacctgtgtgcttggtctgtttgactttacgcccatctcaggacacttccgtagactgtttaggttcccctgtcaaatatcagttacccactcggtcccagttttgttgccccagaaagggatgttattatccttgggggctcccagggcaagggttaaggcctgaatcatgagcctgctggaagcccagcccctactgctgtgaaccctggggcctgactgctcagaacttgctgctgtcttgttgcggatggatggaaggttggatggatgggtggatggccgtggatggccgtggatgcgcagtgccttgcatacccaaaccaggtgggagcgttttgttgagcatgacagcctgcagcaggaatatatgtgtgcctatttgtgtggacaaaaatatttacacttagggtttggagctattcaagaggaaatgtcacagaagcagctaaaccaaggactgagcaccctctggattctgaatctcaagatgggggcagggctgtgcttgaaggccctgctgagtcatctgttagggccttggttcaataaagcactgagcaagttgagaaaccagcattgtgtcctgtggggccctgggcaagaccccagaagcccgccaatggcgggattggggtaggagacagggtcagcaaaggcaggaagagttgctggagaggtgccctcatgctcttgtcccttcttctcccaatgtcttccatctcttgggtgacactcctgccaggactttggattcaacccctccttcccctcacctggcctcccaagcacttctaggcttgcccttcctaaactcggcaccaaaaggcaagagtgacctcatcactcaaggatcatcagtggctccccattgtcctcaggataaacttaaagccagctgcagtgactcacgcctgtaatcccagcactttgggaggctgaggtgggcagatcacgaagtcaggagttcgagaccagcctggccaatatggtgaaaccccatctctactaaaaatacaaaaattagccaggcatggtggcacacacctgtagtcccagctaactgggaggctgaggcagaagaatttcttgaatctgggaggcagaggttgcagtgagctgatattgcgccactgcactccagcctgggcaacagaatgagattccgtctcaaaaaaaaaagaaaaactcctggcatggccttttgagatttgggccctcgccagcctcattccctcaagaaattgggaaagggccaatctgggagcccaggccaaacccagatctctgaggaaatcctccctgaataccactgcaggtgaccctccccccagccccccacacacaaatgggagctgtgcgatgggagggactcctttatatctgtatatataagatgctgtctttgacacagagtgcacacacatgtcaggcatgattaccactttctgggacagttcatctatgttgtgaagtaggtgatgcaatgattatccaccccgtttttcagatgggaaaatggaggctatttcctatcagaacagaaaaaggggactccagatccccatgctgagtctaaaggacacttgtgctatctctagcttgttctctcaagtttcttatgcccaagagcttggtcttcactcctggttcagagccctctgcaagggcacaataggtgggagttattggggtgtggttttggtcttggggctgggctgtgctcagggagggaagggacctcaagggttcagaagtcccctccacctagcaggcagcgatagaaaggcaaatgtttatttggtgagaggatttgcccagaaaaggggaaacagctgtgcagatccctgagaaagggagatggaggaggggagaggatgggccccgggcgccatcatgctggcatgcctgctccaccctaagtgcttagggagtcttgtgaagccaccctccctcctggtttcacagacgaaagcagcttcagaagctcacagaaggcactcacttgccccagggcacacacaagatgtaagcagagcagctatcccagccttcccaggagtatcccatccccccttacctcccatcttagtcccagagcccccaggcgggtggggctgggcagcctcacttctgctgtgagcgtcctcttcccactccgggatcaggccacgtgatgaggaggaaacatgggctgagtgtctacaatgcccaggctttgtgccaggtgctgatgtccgtggccacatctgtccccattgtaactcaccatcagagtcttagttgcagccatgggacaattagtatgctctagacacttttagatataatgtctcctaagcccacccaacaggtattcagctcattttgtgggagagatgcgggcattggtcaagccaggagacacctcttccccaagaaaaggctctggtgctgacatctctgctgaggaagcaggagcctgggcctgggcctgggaaagggggtgctgtgggcttgcctctcagtttctgactcgggaccccctctgccctggaaagttcagggggatggggcagaggtgtctcatctcccttccccccagcaagagaagctataactttcttcctggatgtgctaaagggaagtggatcaggcaggaaggcagtttaaaatcccaggctgccagccagttttaaaagttgtttagctttggccagggtggggcaggaattccagcctgcaggagttccgagcagccacgtgctgccagctcacatggttagagagctacatgaggctggcgtaagcacagagagccagttgggggaacagtagtgtctggagggaagggggaagaatcttcatccactccattgtctgaattgttcacccggtaacttttgccatgacaattttacaaattaaggttttcttttaaaattgaggaataattgacatttcatcaagggcacagatcttcagcatggagcgtagacccaagggaccaccacaaagctcaagatgtaggacatctccatcaattcaggaggctccctccgggttacccccactccagaggtaactactattttgacctctgtcacagtaatttagttttatctgttcatgagcttcctataaatgaaattatacagtcagtactcttttgtctggcttctttcacccagcacaatgattttgagattcattattttgtcctgtgtagcaggagtttgtttcttcttcattgctgcatactattccactgtatgaatatacccctactctctttcttctttttttttttttttttttgaggtggagttttgctcttgttgcccaggctggagtgcaatggcacgatctcagtccactgcaacctccgccttccaggttcaagcaattctcctgcctcagcctcccaattagctgggattccaggcccctgccaccacacccagctaattttttttttttttttgagacggagtctcacactgtcgcctgggctggagtgcaatggcatgatctcggctcactgcaacctccaactcccggattcaagcaattctcctgcctcagcctcccaagtacctgagattataggcgcccaccaccacacccagctaattttttgtatttttagtagagatggggtttcacaatgttggccaggctggtctcgaactcctgacctcatgatccactcaccttggcctcccaaagtgttgggattacgggcgtgagttaccacgcgctctctttctcttatcttttaaaaaatatttatttatggccaggcacggtggctcacgcctataatcccagcattttgggaggccaaggcaggcagatcacctaaagtcaggagttcgtgccagcctgaccaacatggtgatccctgtctctactaaaatcaaattagccgtgtgtggtggcgcacttgtaatcccagctacttgggaggctaagacaggagatcacttgaacctggaggtggaggtgcagtgagccgagatcgcagcattgcactccagcctgggcaacaagagtgaaactccttctcaaaaaaaaatatatatatatatatatatatattatttatttacttatttttatttctttcaagataaggtctggctctattgcttaggctggagtgtggtggcgtgatctcagctcactgcaacctccaccttccaggctcaagcgatcctcccacttcagcctccccagtagctgggactatcagtgcatgccaccacagctaatattttttgtgttttttttttttatagagatgaggtttcaccatgttgcccaggctgaatttttttttcttttttctttttttcttttttttttgagacagggtctcattttgttgctgaggctggagtgcggtggcacaaacgtggctcactgcaggcttgacgttctgggctcaagtgatcctcccatcttggcctcccgagtagctgggaccacaggtacgtgccaccacactcagctaatttttcttttccttttttttttttttgtagagacaggatcttgccgtgttgtccaggctggacttgaattcctgagctcaagcaatcctcctgccttggcctcccaaagtgctgggattacaggcatgagccactgctcctggcttgtttcaaaattaaaaagaaaaacttacatgcagtaaaattaagttttcccttttttattatatgtgctgccaaagttagtgctaaaatttccccttttgagtgtacagttctgtgagtttggggaaatatatacagttgtgtaacccccaccacagttgtgatatagaacataatcatcctatcctcgatggattatttgggcctgttacaaactgctggaaacatacccaggagtggagtgctgggttaccgtgtgtacatttaactttagtattttccacatagttgtccaaggtccttgcaccacgttaccttcccacccacagcgtcccagagttctagtgttccacattctcatcaaaattggtaaatgttgctgggcgcggtggctcacgcctgtaatcccagcactttgggaggccgaggcgggcagatcacttgatgccaggaattcaagaccagcctggccaacatggtgaaaccccatctctactaaaaatacaaaaattagcctgatgtggtggcgcacgcctgtagtcctagctactcaggaggctgaggctcaagaatcccttgaacccaggaggggaagtttgcagtgagccgagattgctccactgcactccagcctgggcgacacagtgagactctgtctccaaacaaaacaaaaacaaaaacaaaaggccaggcacggtggctcacgcctgtaatcccagcactttgggaggcctaggtgggcaggtcaccaggtcaggagatcaagaccatcctggctaacacggtgaaaccccacctctactaaaaagacaaaaaaataaatagctaggcctggtggtgggcgcctgtagtcccagctactcgggaggctgaggcaggagaatggcgtgaacccaggaggcagagcttgcagtgagccgagatcacgccactgcactctagcctgggacacagagcgagactctgtctcaaaaaaaaaaaaaaaaaaggtaaatgttaatttcactcccttaaccagaaaatgtgattgctgtatctagcaaagagatctgttagctgtcaagtgctgaacccacataccgggatgtggtggtggcaggcatttgggtgtcgcagactcagcctgttttccgactctcctatgttgaaagatgaggctatattagtcttagtcttgatttgttctcaagtcagattcttcaaaaatcaaagcgcctctttggagttcattagctgtatgttaattgccttgagtccttctgctgacaacagcccacaaccatctagaaaacatgatttctacaaagtcttgatcctggaatggagcacacagccccttctccccaggccatgatactgctggtggtgcagaacggagtttagacaaggaggtgcatggccgagagcaatctggaaacgatcagagaggccagttgcgtaatgatggagaagccgctgttttgcagccacgaaaatcatgcctggagagagaatgttccgggatgtgaaattattcacaatctattgttcaaagaagacagttgattatgggacggaaggtaagaagcgttcccaccctccccacacaggaggagtctgtgtgggtgccaaggggcgcagcgagggttgccttggccccacccagcgcttactggcacgcagaaccctgggaggactgccaggctctgagtcagcggggcctggggcagcaggaagggaggggcctcacgtggctgggcctcctctgcctcgtggggcctcctggctctcagccctgcaggcagtgcggctgtttgaaaggacaaatcacacatggcctggtcctcctggggcccagccaagactatgttcctgaaggatggctgaggggagggtgcctcctgggtcgggattgggagcactggggaaggaggtcatccaagcatagggcggggagggagctctcagggttgggtcatggaggatgagcagggatgggtttgcagggatgctatggccttccagagctccaggagaagagagctaagccagcccttgggatgactacaagaggaccgggggagacagggaaacacaaggggagtagaaggcttcagtagaagatttcagtagaggctgaaatctactgatatgtacacctccaaggacacatgtgtcacatcagaatagttgctgaatcccactgggcctctatttcctcatgtgtaaaatgggaataataaagctcctacttcacagggctgtggattagatcaaatgagctgatgtgtgcaaagcactcagaacagggcctgctgatcgggtgcagtggctcatgcctggcatcccagtgctttgggaggccaagctgagaagaccacttaaagccaggagttggagaccagcctgggcaacataggaagattctgtttcaaaaaagaacaagggcggccgggcgtgggggctcacgcctgtaatcccagctctttgggaggccgaggcgggcggatcacgaggtcaggagatcgggaccatcctggctaacgcagtgaaacgccgtctctactaaaaatacaaaaaaattagccgggcgtggtggtgggcgcctgtagtcccagctactcaggaggctgaggcaggagaatggcgtgaacccaggaggcagagcttgcagtgagccaagatcgtcccactgcactccagcctgggcgacagagcaagactctgtctcaaaaaaaaaaaaaaaaaaagaacaaggacatccacagcaagtgccatacaagaggctgctatggccattattgcttagagccaatgtagggattgacaggagatcagaaaggttaaaaggacatgcctgaaaacatttaattaaaggagccagtctgaaggtttccttttctttctgcacatggacaagattctaggtgatgggtcacaggagaaaagcccagcttggcaggtcgcagtggctcccaccggtaacagggaggccaaaacgggtggattgcttgagcccaggggttggtgaccagcctgggcaacaaagcaacaccctgtctgtacaaagaaatgatttaaaaattagctgggtgtagcacgtgcctgtaattccagctacttgggaggctgaagtgggaggatcactggagcccaggagttcaggctgctgagctaggattgcaccactttgcttgctccagcctgggcaatagagcaagaccctgtctgtaacaaaataagcaaagcccagctgtggtgtgtaggaagcagcagcctatgcagcagtacaggtagcagttaggaagctgccaatggaggtttggtggagacagaagatgggagagctgtctgagtgcccaatgggaggctcccaacacagagtgctgctgtgtctgagagggtccagggaggtagaagaaaggaagagacagacattgcccgactttggcctcctttattctagggcagccataatccaccgaatttcagtccaccttgatttgcagaaaagcatattcccttttcttcttagtttcctgctttgatctttgagaaatgactaaacactcttatcagagaggcattaaaaaatccactgctggctgggcacagtggctcacgcctataatcccagcactttgggaggccaaggcggacagatccctttagttcaggagtttgagaccagctgagcaacacggtgaaaccccgtctctacaaaaaatacaaaaattagccagacgtaatggcacgtgcctgtggtcccagctactctgctctgaaggctgaggtgcaaagttggctcaagcccaggaaacagaggttgcagtgagccaaaatcacgccattgcactccagcgtgggcgacagagcaagaccctgtctcaaaaaaaaaaaaaaaaaaaaaaaattcccactgcctggggctagcagattctacctaattgctctccccacatccagaagtaggtggttgctggtctagcttgaagtctcagtttctgtaaagatcatcaatgtggctgggtatggtggtaagtgcctctagtcccagctactagacaaagtgaggtaggaggatagcttgagcccaggagttcaaagccgtagggcgctatcatcatgatcatcatgtttgtgaatagccactacactccaccctgggcaacataacaagactccatcgcaaaaataaataaataaataaataaataaataaataaataaataaataaatcacatcaatgagtttccagctgggcaccagtggagctccaaaaggcaagccctggctgggcgtggtggctcacctgtaatcccagcactttgggaggccaaggctggaggattacttgaggtcaggagtttgagaccagcctgggcaacatagcgagactttgtctctgtaaatttttttttttttgagacagagtctcggtctgtcgcccaggctggagtgcagtggcgcaatctcggctcactgcaagctccgcctcccaggttcacaccattcttctgcctcagcctcccaagtagctgggactacaggcgcccgccaccgcgcccggctaagtttttgtatttttagtagagacggggtttcaccgtgttctcgacctcctgaccttgtaatccgcccgcctcggcctcccaaagagctgggattacaggcgtgagccaccgcgcccggcaaaatttttttaaaactagccaggtgttgtggggtgcaactgtagtcccagctattcaggagactgaggcaggaatattgcttgagtccaggaagttgaggttgcagtgagccgggactgcgccattgcactccagcctaggggtcagaaagagaccctgcctcaaaaaacaaacaaaaaggcaagccaggctgcctctattgtgggggcaggccccaccctatgtgaatagaaagtggaaggcaggcgggtgggaaggtgggaaaggggccaatgtgaggaggcagggagtggctgtgggcaaccccccaacttggaggaccactgagaaaagcagggttggggggtgtggcgatgggcgcctctgcccacagtcagagggagggtaagggaaagaacgagggagacgtggcccctctaggtaggtgggctgggtcacaaatccagccacctgttgccttcaagctcctctaggttttttgtttgtttgtttgtttgtttttttggtagtgctttatctttcttccttttcattttctctggcacacacaaacacacaatcccacatctgcagccactgggtgcccagctctgccacaagccctgggctaactcctgtaaaagcctcacacatggctgggcacagtggctcatgcctgtaatcccagcgatttggggggccaaggcgagtggatcacttgaggtcaggagttcgagaccagcctggccaacatggtgaaaccccatctatactaaaattataaaaattagctgggtgtggtggcaggtgcctgtaatcccagctactcaggaggctaaggcaggagaattgcttgaaccggggaggcagaggttgcagtgaaccaagatcacgccattgcactccagcttgggtgacagagcaagactatctaaaaaataaaataaaaagcctcacacacatgaacatgcacacacatggccgcagcacactcagactcttctgtttcgtcttcagggcaggtctggcaaccacaggatgtcctgctggtcccccctcacctctgagctgccccacctgttttttctggtgctgatcaagtcctctctgataccttcccctgtctgccgctggattaacggtggtcaacatttattgatgtatagagtgcctactaggtgccaggctctaccctgtccacttcacatgctgcctcacttaggagggcgttaagttgcatgtaacagaaaccccactcagcggtttaaccacataaatgtctgtacacctcactcaacaagtagactctgcagcatctctggggccgaggctccttcctgcctcactgttctcagcacacagcttttggccctggggtcacaaaaagtcagagaatggcactgagtctgccccccttatttggaaaacaatgactttcctgaggcctcacccaggtggctcctacagtgccccaccggctggggaggatgcagatgcatttctgattggactcatgtcctctaaataaaggagggccaggggaccctgagtctgggaaggctggcttcttttcaccctttgtatttgctctgatctagtccttatatccagaatgcccttcctgccatctgcagctactgaactcctacctctccagaaagcccagttcagatgctccctcctccacacagtcttgccagattgctcctccagagtcctccccacttctgaatctgttggccatcttgactcctacttgccttggccattgcacctgtctgcacagagcctgatgggaactctaagcacccagaggattttcccagcagaatgagtggatgagcacacaaatgaatggtgtgttctcacttttaggccatctccatcctttgcgatcttgttcaagtcctccctccacgtacagtcctcccccgacctctcttacttccatggtggctgctccagggagcagagctcatgtccccggtgccttccacttggcaccatgctgtgagacactggccacatcagggagcatctctgagcccacttagttatctgttaaatgaaaggctatgctctaaatttcttctcatgctaaaaacctcaaccctgccagaattcaagccttggggcaggggaaggattctatcacattcctttttttttttttttttttgagacgagtctcgctctgtcacccaggctggagggcagtggcgcgatctcggctcactgcaagctcctcctcccgggttcacaccattctcctgcctcagcctttccgagtagctgggactacaggcgcccgccaccacgcccggctaattttttgtatttttagtagagacggggtttcaccgtggtctcgatctcctgacctcgtgatccaccctcctcggcctcccaaagtgctgggattacaagcgtgagccactgcgcccggctatcccattcttatcttccagtttaaaggcagacttcaaagtaaaatcgttttagtggaattgtcacagccattgttaaggttttaattgaatttagtatatagaaaagtgcatatatcttaagtgtccagcttggttaatacttacaaagagaatatactcatgtaatcaccacccagatcaagacttggaatgtgaccatctcctaaagctccatgcctctccagtcattgcctccctgggataaccaccattctgacttgtaacagtgcagcatggcttgcctagatttggaccttttatgttaatggagtcacatggcatgtacacttctgtgactggcttctttcactgaacattgtgtctgtgagagtcactcatgttgtgtatcagtagttgttcttttccattgccctatactattccactgtacgagtataccacaatttatccatcattccataactgatggatatttgggtagtttccagtttgggacaattaagagtaaagatactggccaggggcggtggctcatgcctgtaatcccagcactttgggaggccaaggcgggcaggagttcatgaggccaggagttcgagaccagcctggccaacatggcgaaaccccgtctctaatgaaaatacaaaaattagacagacgtggtggcaggtgcctgtaaccccagctactcgggaggctaaggcaggagaatcgcttgaatccaggaggcaaaggttgcagtgagccgagatcgtgccactgcactccagcctgggtgacaagagcaagactccatctcaaaaaaaaaaaaaaaaaaaaaaaaagagcaaagatactatgaatattctatttgtgtcttttggtgaacaacagcccttatttcactcaggtacacatcaagagtggcgctgctgggtcatggagcagtgaggtcagcatgagtagccactgctgggcttgctgttttagatgatgtctgagctagcaggcatagacattcccaatgtacccagaacagactctcagaagcatgggttggacccaggagagcccagtggccaaggaaaagggatctcccagggcacacccacaagcagcctccagcaaaaccatcaagcaaaacccccactcccagtaggctgaggaagccctccatgctgtcacctccatctgggtctcccactgtcctctgggagtagtagctcaagccagcctcccacagctgtctcctccacacacctcacatgaggccagccctctagtggtcagaaacttggtgttgactcactgcctgaggagtggacagaggctgggaaactgtgttccagatgccaggtggcccccagcaaccagagccctctccttgctagctctctgctgtaatcagctggcagacaccagccctggctgagagcaatagggactggggaccaggagctgtgccaacatcactccccagcctcgtagctgaggccccacagtctctgggcttgccgcaacacctgcacacacatttacgtgttgtcacatgctttggccaggccctggccacctgcagcttcccttcagtcacctcctaacctatcctgggtcctatggcttaaggggcccagagtgcactttctcagggggtgctggctctaggatccctgcctgggccaccctaccctgttctcctttcttgtcaccaaagagcgtgttcaagccggctccagtcctgtgttgtgcatggccctggggagtggagatggaagccatcagcactattggtgagacctgattcacaggggtgcaaaggccgcagctgaatgccaacgggcagcctgagcaggaaggcttcctcccattttgtctgagtatatatctacaaggtcaattaaaaggacaggaaaggccaggcgtggagactcacgcctgtaatcctagcaatttgtgggggagaagcgggaggatcacttgagcccagagttcaagaccagcctgggcaatacagtgagacgctaactctacaaaaaaatttaaagtagctggatgtgttgcctgcctatagtcccagctacttggggggctgaggtaggagcattgctgatgggagcgggcagcgaggctgcaaaaaaaaaaaaaaaaaaaaaaaaagccgggaaagggaattctaggctgggggaacagtcagtgggggaggctccgaggcacatttgggggacaaggctgaagccattcacatgccaagaggtaaaggaggtgcagcttcatggtcgcggtgggggtggtagtggtggtggtggctggaggaacacatgcaagtcaggcagtgaggcccaggcaggccttgtggggcccccaaacaccaatgggccaagcctccaagttggggcttttacgtaaggctctataggggttagcgccagagtgcccctttcaggtttaaggtataaacctcttccctgttgttttgatggcctccagtcaagaagggggcttgctggtcagccctactaagcgttcgccctgggcgacactctacaaggttttactggggcccaatgaaattgacagatctgccagggacacacactgagagtccagaagcagcgttcgaatcgttctgcgccgaaccgagtgacagcattaaaccgctgcaggaacccacaaattcagaatctgcgcaaaatacacatatttgtatttaaaatccgcgcaaaatacccatgtgcctaaatacacatatttccctccaaagtcataatttccgggggtacagcccaggaatgtacatttgaactggtgccccagtgattctcacgcatgttggctagataagaactcagccgcagcccgtagctgcgcggcccggcctaggtccacccgccgcccgtcccggagcctcctaaggccgcaggcgacgcgccccgccctccggggacaactaggccccggccttttccgcagactccgcgctccgagccgcggcgccccctcgcggccgccggggtcggcagcctggggctccgctgatctagggcaacgagcgggggacgcttcgagcccgcagcgagagtgaccagcatggtccctgccggcagctcggggccggagggttttgactgcaaggccagcccacgccgagggtccaagcatcgggatatgccgccagcacctggctgctgcagcaccgcgctggacatgagcgctccgcccaacccgacggcgtcagctggcgcgcgcgcccgcgaccgacgtgcgcaggcgcccacgggccgcgcagccgccattgctctcctgccacggaggggagcgcttggtggcagtccgcgggcccggacggaaggctgaggcgacgcctcgacgacagcggaccggagctgcaggggcaacacattcagggcggggtgccccatttaggcctggctgaccggagtaagaaactacaacccccgaagtgccttgcgcctcaaggttacggaggcagtgacgtaagctgtcttgaccgctaccatttctctagtagaggcgggacgcggcggcgcggagtgatgacgcgctctgctggcggctggagggttgcggaggtcagcaattgggtgctgggctccggttctcgaagtgcctttgcgaacctgctattttaccagtttaaactgacggtctgtttagccttagctacagatacccactgactgtgtacccgccgcctttcaacccccgggccggccactgagccagccagataaccattactattatttagtttctattttgaaacagtttcaggtaactcctgtatgcacttggatgagattcacaagttgtaacctcatttgccccatttaccttattatttcctctgtttttctctctgccttttttcttccctggaccaagtgagttagttgcagatatgaaatcctgtttcctctatatttagaggcccatccgtgtttattttctaaaaacaaggacgagctcctgcattcaaaatcgggtaacattggtcaagactttttctgacccatagtccatattgaaatgtttttaaagtttttattagtgtcctaataatgccctttatggaaattatccttttgtttttctttctttttttttgagacaagagtttccctctgtcgcccaggctgaagtgcagtggtgcgatctcggctcactgcagcctcccctcccgggttcaagcgattctgtggcttcagcctctcaagtagctggggttacaaccatgcgccaccatgcccggctaatttatttttagtagagatgaggtttcaccatgttggcaggctggtctggaactcctgacctcaagtgatccgcccacctagacctcccaaggtgctgggattacaggcgtgagtcaccacacctggcccaaattacccttttcttggtccaggacccgatccaggagtacacgtcgcattcagctatctggtctcttcagtctccttcggtctggagcagctcctcaggttttccatgaccgcatgaccttgacgcttttgaagatacctgttgttttgtagaactaggtttagggtggtctgagattttttttgtttgtttgtttgtttttcttttttctttttttttttttttagtttatgcctattctgcttatgtatgtctgagattttttatcactggattctgttatgtgatgttgttcagatgctgttattcaaagtgttcagcctcactggcctctggatacactcccagacactgccaggtcagccccttcctgtggtcgcctctcctgctggggttcactctcaccttaccaatgtctctggcttccctgtagcacccaccctggagccatggtccacgccttcctcattcacaccttgagggccccgaatactgaggacacgggcctttgccgagtgctgtactcctgcgtcttcggtgctgagaagtcacctgatgacccacggccgcatggtgccgagagggacaggcttctccggaaggaacagattttagctgtggccaggtaaccacacagcccagccccaggccttcattgaacacgtacctgattgtaataggtattttcggggagtggggacgcagagaaataggaggactaagaagcagagaggaagttttagagtagcatttcccagagagtcttccacagcttttcataagtgttacgtgaaaagggttaaataaataataattctgttatcattattagtataattagcatttgttcagcctgtaagtgctaagcatttatattctgaacatcttatatatattaactcatttaatcctcataatagtcttttgaggtaggtatagttattatctccaccttatagatgagtaaactgaggtatagagtgtttgaggaatttaacctgtccaaggttacatagctagaaagtagcagaactaagatttgagagtaggcaggcagacagtacagattaaacatgcttttcagtgcagtacttaacagggcctttagtgtgcctgtagactttatgaatttctaacgaagagagaggatgtggtacatgaggactccagaaagccagggatccagatcacagtttggaatatactgttccagactagggtggctagccttggctcttcccctctcagacccagccagaactggtaggtgctggagcctcctggacctccgcattctgggtggggtagcaccactctggggcaaccttctgccaactcctgcctttcccttgttcttcttattctccttcccctccctgtagctcagaaaaccaaatacatgcctttaaaaccagcctgtgcgtggctcagactggaaggtgattcaggaaagatcaaagggagcttctaagaagccttgttggtccaatggaaggtctttctttcatatttggagagggttgcaggatagggtggagattggactgcccacgttgggtgatggcgtttattttctgcctcatccctttcctttttttgagatggagtcttgctctgtcgcccaggctggagtgcagtggcgcaatcttggctcactgcaacctccgcctcctgggttcatgccattctcctgcctcagcctcccgagtagctgggactacaggcgcccgccaccacgcctggctaatttttttaaatatttttagtagagacggggtttcactatgttagccaggatggtctcgatctcctgacctcgtgatccgcccgcctcggcctcccaaagtgctgggattacaggcttgagccaccgcgcctggccaagccgcttccctttcctttatgtggagaaggcctctgtgaagcaggtgagggcaggatcttcttcctctggtgccctttttcagcccaaggagctgggttgaaaacctgccctcttggccacatggaataaagtggttcaggacctggaggctcacacttcctgattctgtggccctgggcagatcacttagtctctctaggcctcagttttctcacttgagatatggggatgatggtagctcccagcaccagggttgatcatgaggatgacagagttggtgtgtgagcccaccagcctgacctgcccactctccccaggcaggtagagtcaatgtgtcggctgcagcagcaggcatctggccggccccccatggacctgcagccgcaatcctcagatgagcaagtgccgctgcacgaggccccacgtggggctttccgcctggcagcagagaaccctttccaggagccacggacggtggtgtggctgggcgtgctctcgttaggctttgccctggtgctggatgcccatgagaacctgctactggctgagggcacgctccggctgctgacacgcctcctccttgaccacctccggctgctggcgcccagcaccagccttctgctgcgggctgaccgcattgagggcatcctcacccgcttcctgccacatggtcagctgcttttcctcaacgaccagtttgtccaaggcctggagaaggaattcagtgccgcttggccccgctgattcctcgttgggatggtgcttctgagggcaggcagagggtagacacacagccagatgaagcttggcatctccctcctacccagcagctctgatgtgctgctataccaggacaagtgggtgacacaagcctgcagaaagggggctgggcagagggtggaggaggtcctgcctgtcctcaggttagtggaaccacagaacttcctgagcctagagctgctgtgttacttagaccgctgccgtgcggcagccacgcttgtccttgaacccaccttcctccatccctgccagccgatagtgctagggtgaggagctgcctggagctcaccccgctcttcttccaaacccacagtcaaggccaggcgcggtggctcacgcctgtaatcccagcactttgcggggctgaggtggttggaccacctcaggtcgggagttcaagaccagcctggccaacatagtgaaaccccatctctactaaaaatacaaaaattagctgggtgtatggcgcccacctgtaatcctagctgctcagggggctgagtcatgggaatcacttgaacctgggaggcagagtttgcagtgagccgagagtgcgccacttcactccagcctgggcaacagagtgagactccatctcaaaaaaaaaaaaaaaatcccacagtcatcgaaacacaaaaggggtctcagactcccctgagggtggaggagctgtgcctgcatgctggcaggccacagcccctggctttgtgcccacttaggcagtattatcaacaaggtcctgctcagtgtccagcccccgctgagttcagaaatgcatctgccaatcagcagcaggattctgcagctccttttgtgccaagcccgttcccaccaggcaggctcgagataaagtcatcacagccttccctcatctgcagggagagaagttgctgtcagatgaatgtgagcagtctagcctggatgacatatttttcgttttgaattaaaagcactggctgtgtgattttaccctctttctgtgagtttgatgcgtgcatcctgctcctatgagtgagtgcctctctggatggccccaaagctgcgtgtctgagctttcgtggtcaaggatccccctaggaggcttcttgggatgcctccatctctcatccccacctcacctctgtctccttagaggcctcctttggatggtggcacacatttctccaccaaagtatatgtcacaggtggcaggtggctgtggcagagccgtctgagaagcagtgcttgggctgagaattggtgcgagtggtttatgtggggtgggcggtgatcccgggaagcaggaaggggacacagtcctcgtgaatgcttgtcaagcctattaggactgtggtagggagctgagtgcctctagggggctgcacacagcagttgcctctgaattacctcacctgagaggtggcggctgtgggtgtttgcctactgcctttagtcagtggttacaggttgatcccagggtgcatacattccctggctctttctgcccctgagaaaaagccttcaggcaatgtggagctgggcctgcctgcaccatgttgagtcccaaagggatatgggtggggtaccaaaagtcggtggttaggaggtcttcaatcagcagcttctagtgaaggtttaaacttactcagttgggggcggggggtgggggaaaaaccacttcagtttacattgattttcatgatcttcctgttaccaaggaaggtgaggctttcttggcagaacgagcctcctaggtgctcagctctcatgcttgccatccatcagttgccctttagcatccaggatggacccaactacacccactttggaggcagcactgatgattagcccttccaagtccatggccaaggccaccagccatgccaggccttctaccaccactgtcaacataattgggatgaggccaccttttccattttatggtgccacaaaccaccttgaccatgaagacctaaagggatgttactctgtgtgtgtggccaagtcccaccagtggaaatgtcccacaggcctctagtagggacaccccttccctatacattctgttctcctggcccacccctcaccccaggctggcggtcctggtggattggctgtgttctcagggaacaggccattttgtcctctatggaaaggctcaagcttactgatctgaattctttctgcctttttttcaaacggaacttaaggaagaggttgagactctgctcccctgggagctgtgggaagttgaggttaggcgtggctggtggcctggttctcatgaggtggggcaaactgatggacaagagaatagtagagactgagaccacaccgtggggctgctgagctccagttcctgtccagctggaccagggttttcttaaccagatgagcttgcccagcacccttcccacacttcacacttctgccccagcctcttgggctgggtttccaccacaatttatgctcaccatatatttatcgagcctcccttgggcctgatgctctgctgggtgcaatgcaggatacagaatgaccccaaagttccaggagagacagagctaaggccaggtgactgcagatgactgcaaagcagcaatggtttgagcatccctgaattgctgctcacaagtgctttaaacacctaaaggaagaaggggcacttcagtgacgaaggccaagtgaaggagccaggatttagaactaaaagtgagatggctatggaagcaaacttgcctccctctccaagcctcttccctttcttctccctgccccaggaaccctggccaaaccacatatccctcagcttcttgagagaactagagactttgagcagctagtagtgttaccagtgtacctccacaaacactcctgggacaacagatgatgacaggagggcagtagagcccagagaagagagcttacctggaaggaggaagaagtcacaggttttgttttgttttgttttaggcggagtttctctttgttgcccaggctggagtgcagtggcgcaatctcggctcattgcaagctccgcctcccagattcacgccattctgtctcagcctcccaagtagctgggactacaggtgcctgccaccacgtccggttaagtttttctatttttagtagagacggggtttcaccgtgttagccaggttggtctacatctcctgaccttgtgatccgcccgccgtggcctctcaaagtaccgggattataggcgtgagccaccacgactgactggcatgaagtcacaggttttaaggcaggaactggcctgcatgtatgtgggtcactgattgggtcacatacactgcatgtatgtgagccctgggatgggattggatcatcttgtctcctttagggcagggtgtttttttctagccctgtggtgctgcgcactgtccagcatccccccagggctcaatgttttcttttctttttcttttttttttttttttgagatggagtctcactctgttgctcaggctggagtgcagtggtgcaatcttggctcactgcaacctctgcctcctgggttcaagcaattctaccgcctcagcctcccaagtagctgggattacaagcatgtgccaccatgcctggctaatttttgtatctttagtagagacagggtttcaccgtgttggccaggctggtctcgaactccttacctcaggtgatccacccatattggcctcccaaagtgctgagattacaggtgtgagccaccatgcctggcctcaatcttttcttttaaacaattattcctatattttattgtaatgcagttaaccgtgtttgtcagattcaatactctgtgacccgttaaccaagtctctgtatgtttattactgcaattcaagtggccgtgaccgttttcttaaatatactttatttgtttagtgcaattttaggttcacagtaaaactgagcagagggtacagagagttctcatttactccctgtccccacacatgcacagcctcccttatcaccaacactgggcaccagagtggtcatttgttacaactgatggaccttcattgacacgtcactatcaccagagtccatagtttacattagggttcactcttggggtggtacattctataggtttggatgtattttcagtgacatgcatctaccattatagtatcatacagaagagtttccctgcccgaacagtcctctgctgcacctgttcattcttccctcccctcaacccctagcaaccattgatccttttactgcttccatagttttgccttttccagaatgttgtgtagttagattcatactgtatatgtagccttttcagattgacttccttcacttagtaatgtacatttaagattccttcaagtcttttcatggctgaatcatgagcttgacagctcattttggaagtactgctgaatagtattccattatgtggatgtacattatctgttcacctactgaaggacatcttggttgcttccaagttttggcaattatgaatacaactgctacaaacatttgtgtacaggtttttgtgtgaacataagttttcaactcctttgggagtataaatactcataaataccaaggaatatgagtcctggattctgtggtaagagtatgtttcattttgtaagaaactgccaaactgtcttcaaaagtggctgtaccattttgcattcctgttggcagttaatgagggtttctgttgctctacatcctctgaaacatttggtttcgtcactgttttggttttggcccattctttttttttttttttttcctgagacggagtgtcctttgtcatccagactggagtgcagtggcactatctcgcctcactgcaaccttgactgcccaggttcaagcaattctcctgcctcagcttcccgagtagctgggattacaggcgtgtgccaccacgcctggctgatttttttttttttttttctgagacagagtctcgctctgtcatccaggctggagtgcagtggcacaatctccactcactgcgacctccgcctcccgggttcaaaccattcttctgcctcagcctcctgaatagctgggactacaggcacacgccaccgcgcctggctgatttttgtatttttagaagagagagggtttcaccatattggccaggctggtctcaaactcctgacctgaagtcatctgcctgcttcagcctcccagagtgctgggattacaggcatgagcctctgcacccggctggcttttggccattctaataggtatgtagtgaaatcttgttttaatttgcagttccctaataacatgacgtagagtatctttcctatgcttacttgccatctgtaaatctttagtgaggtgtctgttcaagtcttttgcccattttaaaacaggcaacttgtttgggtgatttctttttgttgagttttaagagttctttgtgtattttggataacagctctttatcagatataccttttgcaaatattttctcccagtctgtggcttgtcttctcattctcttgacagtgtctttcacaaagcagagctttttaaatttaatgaagtccagtttcatataatttaatgaagtgggccgggcgaggtggctcatgaggcctgtaatcccagcactttgggaggccaaggcaggaggattgcttgagcccaggagttcgaaaccagcctgtacaacatagagacttcatctctacaaaaaaatataaaaattggctgagtgtggtgcacacctgtggtcccagctacttgggaggctgaggtcgaaggattgcttaagcccaggaggtcaaggctgcactgacctgtgactgtgccactgcactccagcctgggtgacagagcaagactttgtttccaaaaaaaaaaaaaaaaaattaatgaagtttgtcaattttttttttttttttttttgagacggagtttctctcttgttgcccaggttggagtgcaatggtgcaatctcggctcgccacaacctcgcctcccgggttcaagcaattcccctgcctcagcctcctgagtagctgggattacaggcatgtgccaccacccttggctaattttgtatttttcgtagagacagggtttctccatgttggttaggctggtctcgaactcccgacctcaggtgatccacccgcctcggcctcccaaagtgctgggattacaggcgtgagccaccatgcccagctctttgtcaattttttaaatggatcctgcctttactgttgtatttaaaaagtcatcaccaatccaatatcatctagattttctcctatgttatctactagaagttttacagttttgcattttacatttaggtctatgatccattttgagttcatttttgtgaagggtgtaaggtctatgtgtagattcatgtttttgcatgtggatgttcagttgttccaacataatctcttgaaaagagtctttctatctttgttccattgtattgcttttactcctttgtcagagaccagttgactgtattaatgtgggtctctcctgggttctttattctgttccattaatctgtttgtctattcttttgccaatactacactatttttttttttttttttttttgagatggagtctcactcttacccagcctggagtgtaatggtgcaatcttggctcactgcaacctccaccttccaggttcaagccaccctcccgccttagcctccctagtagctgggactataggcatgcaccaccatgcctggctaatttttctatttttgttagagatgggatttcaccgtgttggccaggctggtctcaaactcctgacctctggtaatctgcccacctcagcctcacaaaatgctgggattataggcatgagccactgtgcctggccaccacactatcttttttcaaggttttttttttttttttttttttttttctgagagagagtctcactctgtcgcccaggctggagtgcagtggcgcaatctcggctcactgcaagctccgcctcccagctttacgccattctcccgcctcaggctcctgagtagctgggactacaggcgcccgccaccacacctggctaattttgtttttgtatttttagcagagacggggtttcaccgtattagccaggatggtcttgatctcctgaccttgtgatctgcccgcctcggcctcccaaagtgctgggattacaggcgtgagccactgcacctggcccactatcttgattactgtaactttatagtaagtcttgaagtcaggcagtgtcaatctttaacttttttcttcatatatatatatctatatatatatgtgtgtgtgtggtgtgtgtgtgtgtgtgtgtatatatatatatatttttttttttttttttttttggagacaaggtctttactctgtcacccaggctacagtacagtagtgtgatcacagctcactgcagcctggacctccctggctaagtgatcttcccaccacaggcatgcaccaccacacccagctaaattttaaatatttagtagagacagggtcttgctatgttgtccaagctggccttcaactcctgagctcaagcaatcctcccaccttggccttccaaagtgggtaatgtggttttaatatcagattgcacttggctgggcacagtggctcatgcctataatcccagcactttgggaggccaaggtgggtagatcatctgaggtcaggaatccgagaccagcctggccaacatggcagaaaccgtgtctctactaaaaatacaaaaattagccaggagtggtggtacatgcctataatcccagctacttgggaggctgaggcaggagaatcatttgaacctgggaggtggaggtccagtgagctgagatcatgccactgcacttcagcctgggtgacagagtgaaactgtctcaaaaaaaaaaaaaaaaaaaagctgggcgtagtggcttactcctgtaatcccagcactttgagaggctgaggcgggcggatcacaaggtgaggagatcgagaccatcctggttaacacagtgaaaccccgtgtctactaaaaatacaaaaaaattagctgggtgtggtggtgagcgcctgtagtcccagctactcgggaggctgaggcaggagaatggcatgaacccgggaggcggagcttgcggtgagccgagatcgcgccactgtactccagcctgggcaacagagtgaaactctgtctcaaaaaaaaaaaaaacaaaaaaaaacaaaaaaaaaacattgcacttgctgattgcttgtataagtgaaagcaattgacttttttttcttttttgagacagggtctcactctgttgcccaagctggagtgcagtggcgcagtcttggctcactgcagcctgtgccttctgggctcaagtgatccccccacctcagcctcccaagtagctgagattacagatgtgcaccactatgcccagctaaatttttgtgtttttagtagagacgaggtttcactatgttggccagtctggtctcaaaatcctgatctcaagtgatccacccaccttggcctcccaaagtgctgggattacaggcgtgagccatcgtgcctgggcaccatttttttccttttttttgagacggagtctcgctctgttgcccaggctggagtgcagtgccaccatctcagctcactgcaacctccacctcccgggttcaagcgattctcctgcctcagcctcccgagtagctggtactacaggtgcgcaccaccatgcccagctaatttttgtatttttaatagacacggggtttcaccatgttggccaggatggtctcaatctcttgacccagtgatccacccacctcagcctcccaaaatgctgggattacaggtgtgaatcaccacacccggctgagtttttctttttttaatagagataaggtcttcctacagggaggttgccaaggctaatctcaaactcctggactcaatagatccgcctgccttgacctctcaaagtgcaggaattacaggcatgagccacttcgtccagcttagcaattgacttttgtatattaatgttgtgtcttgcaatcttgctgtaatgcttattcgttccaagagtttttgttggtttgtttttgttgattctttcagattttctacattagctaggacttttggtacaacattgaaaatgagttgttaggacattattgccttgttcctgaccttagtgggaaagcttccagtttctcaccattaagtatgatttttgtaaatgttctttatcaacttgtgaagttctcttatttcctagtttgttgagagtttttattgtaaatggtggttggactttgccacatgctttttctgcttttattggtatgataatgcaattttacatcgttagcctgtcaatgtaattgattatcttaattgattttcaaatgttgaactagcctcacatacctggaataaatcccgcttggtcattttgagtaattatttttatacattactggatttgatttgctactattttgttgaggagttttgcatctatgttcacaagagatactggtctgtagtttccttgcttccttccttccttccttccttccttccttccttccttcgttccttccttccttctttccttcgttccttccttccttccctccgtccctccttccctccctctgtcaggagtccaagacaaggctggccaacatggcagaaaccacgtctctactaaaaatacaaaaataagccaggaatggtggtacacgcctgtaatcccagctacttaggcgcagtctcggctcactgcaatctccacgtcccgggttcaagcgattctactgcctcagcctcctgagtagctgggattacaggtgcacaccaccatgcctggctaatttttgtatttttagtagagacggggtttcaccatgttagccaggctggtctcggactcctgacctcaagtgatccacccacctcagcctcccaaagtgctgggattacaagcgtgagccaccacacacctggccatcacttgcttttttcactcaccagtgtatcctggatatttttgtcatagcactacagagacagcatctgtattcttttaagttcttatccatcatgtggctagattatagttaatttagcaaacctaaaagttattgtgaactaccatatttcacatttacaaaaaggtgcttagaattatataatgagcatccaagtacctgtcatttcatttaagaaataaaaaccagctgggtgtggtggctcacgcctgtaatcccagcactttgggaggccgaagtgggcagatcacctgaggtcgggagtttgagaccagcctgaccaacatggagaaaccctgtctctactaaaaatacaaaattagctggatgtggtggtgcatgcctgtaatcccagctacttgggaggctgaggcaggagaatcacttgaacccgggaggcagaggttgtggtgagcttagatcgcgccattgcactcagcctgggcaacaagagtgaaactatgtctccaaaaacagaaacaaaaaagaaataaaacccagcattacctcattattttaggcttttattttcatgaactgtttccttctgttttcatttagtatatccatacctctttaggggtgcttaagtcatttgtttgcagtcttagaaaatgacattagtctttaagttatgaattttcctatgatacagctttagttgtatcccatatgttctgatgtggtgttttcactgttgacattttctagaaatctgtagtttcactttttttccttcttaattccctatttttacatgacttcgtgagaacaatatttttgagttcttgtatgttaaaaaattatttttggctgggcacggtggctcatgcctgtaatcccggcactttgggaggccaaagagggtggatcacctgaggtcaggagtttgagaccagcctggctaacatggtgaaaccctgtttctgctaaaaatacgaaaaattagctgggcgtggtggcacatacctgtaatctcagctatttgggaggctgaggcaggagaatcacttgaacccaggagatggaagttgcagtgagccgagattgcgccattgcactccagcctgggtaacaagagcgaaactctgtctaaaaaaaaaaaaatctttttagagcctttatacttgatctttctgcctgagtgccccaaagattcatctttacatttcagtaacattattagaatgtatctcatagtgcaaacatagtgtgtttattctttttttttttttttttttgacggagtttcgctcttgttgcccaggccgaagtgtgcaatggctcgatctcggctcaccgcaacctccacctcccaggttcaagcaattctcctgcctcagcctcccgagtagctgagattacaggcatgcgccaccatgcccgtttaattttgtatttttagtagagatggggtttctccacgttggtcaggctggtctcagactcccgacctcaggtgatccgcccgcctcggcctcccaaagtgctgggattacaggcgtgagccaacacgcccggcccatactgtgttttttcaaaagtagattgaagtccttttttacttcagaagtattttccagaattatatcttatttttatttgtttttgagacggagtcttgctctgtcgccaggctggagtgcggtggcgcaatctcagctcactgcagcctatgccttcagagttcaagcgattctcctgcctcagcctcctgagtagctgggactacagacacacaccaccatgcccagctaatttttgtatttttggtagagacggggtttcaccatgttggccaggatggtctcgatctcttgacctcttgatttgcccacctcagcctcccaatgtatatctttaaataggtattgtatttcattgtttctgtctcatctaggaattccaattatgcactagttggctcttctttgcctatcaattgtagctatattgtccccacccctttaatccttttaatttggcgcatctcagaaagcactagaaaagaaaaactgcttcctgaagatgtatctcttacttgcagtaaagtagggactacaatgtagctccgtagggaagacccactttagtttaactaaggagagaggctgcaagctgtgaaattcaggaggttcacttgtgtgactcacgtctatgccttctggtcagttccaggtcctccaccattatggaattgctccatcccttagtgtgcaaatggaagttcctgagtcctcatcctacctgcaatgggatgcctagtactccagcatttctgggcttctcaaggggacgtatgtctcctaggcattatgtacattagctttctgcttctatggcattgtcagtctcacttggggtcaggacatacggctcttctccctgccctgctgtctgtctaaacgaagatcttttcctcgatgtccctaaagaaacagacatttgggtatagccaactgttagaagaatttagggggatagaggagagtcatcttacagaatgacagagcaaaaaaacttacaattgattgttacatgctacctttcccctgagtctcttgcccattccacccagtggggtttccccactcctagtctcctcctggggcctcagcttctcatcagctttcacgctactccttatttttaaactgttttcaggctgggtacagtggcacatgcctataatcccagcactttgagaggccgaggcaaaaggatcgcttgaagccaggagtttgagagcagcctgggcaacaaagcgagatcctatcttaataaaattgtatttttaaaagctttttttttttctttttttgagatgaggtctcactctgttgcccaggctggggtgcaatggcatgatctcgcctcactgcaacctctgcctcccaggctcaggcaattttcccacctcggcccctcaggcttccgagtagctgggaccaccggcatgtgccaccaagcctggctaattttcttttctttttctttcttttttcttttttttttttgtgagacggagtttcgcttttgttgcccaggctggagtgcaatggcgctatctcggctcaccgcaatctccgcctctcgggttcaagcgattcttctgcctcagcctcctgagtagctggaattacaggcattgcctgactaattttgtatttttagtagagatggggtttctccatgttggtcaggctggtctcgaactcccgacctcaggttatccgcccaccttggcctcccaaagtgctgggattacaggtgtgagccaccatgcctggccctagctaattttctttttgtacttttggtagagacagggttttgccatgttgcccaggctggtctcaaacttctaagctcaagtaatctgcctgcctcggcctcccaaagtgctgggattacaggggtgagtctctgcacccagccaaaaagagcttttttcttttcttttctttttttggagagatgggatctctctcttttgcccaggctggaactcttcagctcaagcaatcctccggcctcatcctcctgtgtagctggggctacattccttttcattttttttaattaaaaaattgtggggttttttttggccaggcacaatggctcacgcctgtaatcccagcattttgggaggctgaggcgggtggatcacctgaggtcaggagttggagaccagcctggccaacatggtgaaacactgtctctactaaaaatacaaaaattagccaggcgtggtggtgcatgcctgtaatcccagctactagggaggctgaggcaggagaattgcttgaactcaggatgcggaggttgcagtgagccgaaattgcgccaccgcactccagcctgggcgacaagagcaagactcgatcctaaaaaaaaagaaaattgttgtttttttcttttttattgtaaaatatacctaacattaaaaagaccatttaaccatttttaagtgtagaatctggtggcattaagcacattcacaatgttatgtccattatttttattttattttttatttttgagacaaagtctcgctcttgtcacgcgggctggagtgcaatggcgcaatcttggctcactgcaacctccacctcctgggttcaagtgattctcctgcctcagtctcccgagtagctgggattataggcgcctgccatcacgcctggctaatttttttatttttagtggagatggagtttcaccatattagccaggctggtctcgaacccctgacctcaggtgatccacccgcctcagcctcccaaagtgctgggattacaggtgtgagccaccgtgcccggccaatgttgtgtccatttctaaaatttttttttatcgtttgaaacagaaactccgcagccatcaggcactcactgcccacacttccttctttgctctctgaccactcgcgccccatttcattcctgttcatttctcatttccttcttatactgaccagttcaggtcttccctctcccatcagcttggttccaggcctaccttttgatatcatagctgtgcccactaaaaaaagagaaagaaaaatgcagacctgaagctccaccgttagcatctcaaagcatgttttcaactccgctttgaaattacagactcaaggaacacgatgaaactcgtgggcaagacctccttccccactgatgtctgtctgttctgaagggggccacagaaagacatatccttctggagatgaattatgcattttccttaagaggcacatagagctttaccaactttttcaacaacgttcccccgctacatagtctttcttttgtgttatttagtttaccatttcttttttccatcttgttataacctccacgagttgtgtctcttttgttttctacattatacccaacggctagcacataacaggcacccaatatatactgaacgaactaaggaatgaatgaaggaatgaatgaataggtggcttataggaaacccctggggccagggactctgcaacatcaccatgtaactttttctttgtgctgagaagcagagagaaacaatagaagatatctcttaatctctcaaggatgctactcccaggactgcttgcaatttccgaggagataagccacaagttacagaaaggaagcagctgtgtagggcctgcaagtttcctgctgcaagtcaccctatgttcagaagttaccctggctgggccaggcatggtggctcacgcctgtaatcccagcactctggggaggctgaggcaggtggattgcttgagtccaggagtttgagaccagcctgggcaacatggagaaaccccatctatacaaaaaattagctgggtgtggtggcatgagcctgtagtcccagctacttgggaggctgaggtggaagaatcacctgagcccagggggtcaaggctgtagtaagccaagatcacgccactgcactccagcctgggcaaccagagtgagaccctgtctcgaaaaaaaaaaaaaaaaaaagaaggaaggaaggagaaagagaaagagagaaaagaaaaaaaagaaaaagttactctgactttctacactgcttttaatgaatagaaatttatctttcccctcagtgttctggaagagtttacaaatatgattgaggggctgggcaccgtggctcacgcctgtaatcccaacactttcggaggctaaggcaggcagatcacctgaggtcaggagttcgagaccagcctggccaacatggtgaaaccccgtttctactaaaaataaaaaattagctgggtgtagtggcgcacacctgtaatcccagctaattgggaggctgaaacacaagaattacttgaacccaggaggcggaggttgcagtgagccacagtcgtcccactgcactccagtcgctgcactctcgccaaaaacaaaaacaaataaatatgattgagtattaccataggctctggttcctgccctgagggaaggtgagttaaaaagcagtcagaggccgggcatggtgactcacgcctgtaatcccagcactttgggaggctaaggcaggaggatagcctgaggtcaggagtttcagaccagcctggccaacatggtgaaaccctgtctctcctaaaaatacaaaattggccggatgtggtggtgcacacctgtaatcccagctactcagagcctgaggcaggaaaattgcttgaacccaggaagtggaggttggaggtggaggttgcagttagatgagatcgtgccattgcacttcagcctgggctaaaagagtctcaaaaaaaaaaaagcagtcaaagcagtaagaggtctaatgtgcttcaaaactgtagtttcagcactttgggaatccaaagtgggaggactgctggagcccaggagtttgggaccagcctgtgtaacatagcaagaccctgtctctacaaaaaataaatttaaaaagagccagtggtggccgggcgcggtggctcatgcctgtaatcccagtactttgggaggccgaggcgggcggatcacgaggtcaggagatcgagaccatcctggctaacacggtgaaacccatctctactaaaaatacaaaaaattagccgggcatagtggcaggtgcctgtagtcccagctactcgggaggctgaggcaggagaatggcataaacctgggaggcagagcatgcagtgagccaagatagcgccactgcactccagcctgggtgacagagcgagacgccgcctcaaaaaaaaaaaaaaaaaggccagtggtatgtgcttgtcgtcctagctacttgtgaggctgaggcgggaggatcagtagctcagaaggaactccagaactgagttctgaacaagtgaagcttcagatgcagtgatgcgatcatggctcactgcaacctccacctcgacctcctgggctcaattgatcctcccgcctcagcctcccaggtagccgagactagaggagcgtgccaccatgcctggctaattttttgtacttttcatagagatagggttttgccatgttgcccagggtggtctctgattcctgggctcaagcaattctcctgcttcaatctgccaaaatgctgggattacaggtgtgagcatcatgccaggccttgggaacttttggggaaatggaaatattctagatgttgatctggatgctggtgtcacacccatttacttggataaaaatgaatcaagtcctcacgcctgtaatcccagcactttgggggtggaggcgggtggatcacctgaggtcaggagtttgagaccagcctggctaacatggtgaaaccctgtctctactaaaaaaaaaaaaaaaaaaaacccacaaaaattagccgggcatggtggtgggtgcctgtaatcccagctactcgagacgctgtggtaggagaatcctttgaacccaggaggcagaggttgcagtgagctgagatcacgccactgcactccagcctggcgacagagcaagactccatctcaaaaaaaaaaaaaaaaaaaaaaaaagggagagccgggtgcggtggctcacgcctgtaatcccagcactttgtgaggccaaggcaggtggatcacaaggtcaggagatcgagaccatcctggccaacatggtgaaaccccgtctctactaaaaatacaaaaattagctgggtgtggtggagcatgcctgtaatcccagctactcaggaggctggggcaggagaatcgcttgaaccagggagttggaggttgcagtgagccaagatcatgccactgtactccagcctggtgacagagtgagactccgtctcaaaaaaaaaaaaaaaaaaaagagtcaagtcatacacttaagtttgatatatttcactgaatgtaaactgtgcttcaagaaacaaaacccttccatgcacaaaacacctagggtgacatctgtttcctgcactgaatatctgattttgggagaggagccctaggacaagagacagcaagaggggctgagagcaagcagggcaccagaagctgggagcgtggagggacgtgaccagggagaagtcccctgtgttgggggaggcctgtgaattttaggaactctgatatctaactctcaaggcatgtccttgccaagcagcaatacaattaagtgtgcctaatcttatggctcccacactttcaattgttcttcctgaaacaattagatatgaagccgcaagagcccaggcagggctggattgattcttgaactaatcaacatttatgccctcttggctaaactaggcagagttggttttattacagttcagatgtgattaagcacactgtattgtgtcagcggcaggtgacgagccacacagtgtcctgaggcctgatgaaagggctatgccaaccacagtcccagaggaggagctggctgtagcagcgactgacccaggagctgaagtgagccaagccccctcctcctgagacccctgagaggtaaggcaggctcatgccagaccctattacgtcccacatcatggctagaaccagaaccatcttacatggctggtcaaggcaaggataaccccaggaagtcagaggacttggagactctgtattgtaggaaaaaaaaaaaatactagaaaagacactggagcgtcaccagcagtcacccctggatggtggcattattattattagtagtattttttttgagatggagtcactctgtcgcccaggctggagtgcagtggcatgatcttggctcactgtaacctccgtttcctgggttcaggcaattctcctgccttagtctcctgagtagctgggattacagatgtgtgccaccatgactggctaatttttgtagatggtggcattatgaatatggattttggttttcatcatcaaatatttctgttttccccacattagctgtaaacagtatatatttttggtaaattaagttgaaagaatgaaaaaattaaaatagtataaagaatatctgtttaagtgcagtggagtgtgcctgtggtcctagctacttcggaggcttagatggaaggattgcttgagcccaggagttcaagaccaaccagagcaatgtagcaagactgtgtctgttttattttaaaaataaataaataaaacataaagaataactgtttaaaatactattcaaaatgaagtcataaaggaggggattatgttttttagtcatagttccctcaagggctcagaccggagaacataaccgagtttggagccctctggcactgtctttgcgcctgacctctgctctccagggggtgacgtgagctggtgggtgctgagtcatcatgggtgggtcacagcctccctcggaggcctggagatgggcctgtctgtgctgaactttactgggcagggggcagctccaaggccctcactgggggcagcctagagcatagatcactctctggacttgctcttctcctaataaatggacagtgatcaatgaattacacccatgaaatagggtgggatgcaataagaaataaaagataatataaatagccagatagggtcaaaagatgatttattttactttatatttttgaaataatttcagatttacaacatagttgcaaaaataatgcaaatgtttacatcttacataacccagtacaatgatcctaacactgacagattgttgttgttgttgttaatttgagacagagtttcactgttgttgcccaagctggagtgcaatggtgcgatctcggctcactgccgcctctgcctcccgggttcaagcgattctcctacctcagcctcctgagtagctgggattgcaggtgcccaccaccatgcctggctgatttttgtatttttagtagagacagggtttcaccatgttgtccaggctggtttcaaactcctgacctcaggtgatccacccacctcggcgtcccaaagtgctggaattagaggcgtgagccaccatgcccagctagattattgttaactgatccaaaagccttatttggatttcacctgaagtcctttttctgtttcaggatccaacccaggttcccatattgcattcagttgtcatgtcactttggtgtccttttctctggagcagtctctcagtctccttgtttttcctgaccttgaaatttttgaagagttattctgcagagcagtgctatccaatagaactttcagtgatgatagaaatgctctgtttgggcctgacgctgtggctcacacctgtaatcccagaactttgggaggctgaggcaggcagatcacctgaggtcgggagtttgagaccaacctggccaaggtggagaaaccccgtgtctactaaaaatgcaaaattagctgggcatggtggtgcatgcctataatcccagctactcgggaggctgaggcaggagaatcgcttgaacctgggaggcagaggttgtggtgagccgagatcacgccattgtactccaacctcaacaacaagagtgaaactctgtctcaaaacaaaacaaacaaaaaaaatagaaatgctctgtgtcaccgagtatgaagccattagctacatgaaaatagcatttgaaatgtggctcatgggccaggtgcagtggctcacgcctgtaatcccagcactttgggaggccaaggtgggtggatcacttgaggtcaggagtttgagacctgcctggcccatatggtgaaacctcgtctctactaaaaatacaaaaattggccgggcgtggtgacatgcgcctgtagtcccagctactcgtgaggctgaggcaggagaatcacttgaacccgggaggcggaggttgcagtgagccgagattgggccactgcactccagcctgggtgaaagagtgagattctgtttcaaaaaaaaaaaaaaaaaaaaaaaagagaaatgtggctcgtgggtctcaggaactggcttctaagtattatttaattttaattaaaatagctacatgtggctagtagccattgtattggataggacagctgtcaaatgtctctcgttttgggtttgcttactgtttccctatgattagtttcagatcatgagcttttgataggaataccataagcatgttgttgtgttcttctttgtctaaatctttataaaagctgttgataggtggcagggaaccacctagtcaggcagtgggattgtttgaatgctctttgaggtccagcaaagacaggagtgatagctgcacttggaagcccgctcctacactttcaatgttcttcctgaaagaattagatatgaagctgctagagctgctccggtggggagcaggcaggattgattcttgaactaatcaacatttatgccctcttggctaaactaggcagagctggttttattacagttcaggtgtgattaagcatactttgtaaatgctgaaggttgtgaaatattcacagggatataaagtacagtaataaaacctcacttgaggctgggcgtagtggctcacgcctgtaatcccagcactttgggaggccgaggtgggaggatcacctgaggtcaggagtttgagaccagcctggccaacatggtgaaactccgtctctactaaaaatacaaaaattagccgggcgcagtggcatgtgcctgtaatctcagctacttgggaggctgaggcaggagaattgcttgaacccaggaggtggaggttgcagtgagccgagatcgcgccattgtactccagcctgggcgacagagcatgactctgtctcaaaaaaaaaaaaaaaaaaaaagaatagaagaccctgtgcctggaagatcgtaggtgctcagtaagtgctggcctctgccccagaaggggaagggcgaggcagatggcaggaactgcgggaggtacctgtcccaggcccttgggcgtaagaggcctctcccacgcagcacccaacccatacccagcctgcccgccagccaaccttggcgtccctgccttgcgcctacctacccagcagtcccccgcccgctcccactcccacaggcccagcgtgcacgtctccaggataggcatccttgcccctgtgacttcagcggcacccaacgtttattgggcactaactgtatgccaggccatgggggtgccggagagaacgacacgaagaccctcacccctcaaagttcccagggggaggaggggctgcttcacttgggaagcgtggggatggaattctcagccccccgatgactccgaggccggccacctgcctggtttctggccggacaccggacttcccctggaagttgctcgagactgcgcgcccccagcaaaaaatcaggtcggttctccgagcccagtctagcgcttcccgacccgcaaaccaaggcccagtgaccgtccccgctgcgcagccgcctgcgtcgccagccaaccacgcgcggccgagtagccccgcccctccacatggccaatggccgcgcgctctgcccgccccgcctcctcgctgcgggaagggtcctgggccccgggcggcggtcgccaggtctcagggccgggggtacccgaggtaagatcgcttcccgggcgttgggtcctttcggctcagcacgcacggacgcctttagggaaggtggctgcagcggcaggacggagtccgccgggacgccctgggtctggggtgcgcggggggcccaggaggggacaggacgcgcggggatccggaagagcgggccctgtcgcaagagtttcgggaacactgagggctccaggcgccgcatccagcatccggggaaaagggggtaggtggcgctgggcgtctgctcaggctgggggaaaggtagggccagaaggggacgggcagcggccgctgacctcctcctgccgcccgcgggcccagggtgacgctaaggtggggccgagcctcgaccgggtgcgcctagaggtcgagtgctgccgccctccgctgggtctggacagttctcggcggcgacaccagctcaaaacggcctccccgccctccgcggacctgggtcgcgcccaggaatccgatccaaggctgtgaggcctgtccctttgggaagggtgggtgtttatttccgggatgcactcagagcctctggacagtcaggtcggaaactttgctgtattgggaacactctgtcacctacttccttctcagttgggaaggaagtgccaagaaaacatgaaacaaaccaaaaacacgaaaaagggattctctgtatggaagccgtgaagcctcaaaaatatctaggaggacagccagcgacctgggacctgtggcagccatgtgaaagcagggttaatgtctggactaaatgttgcttccacctaagtgcaccctcagcctccctcccgccaagtgaccttgggtcctctttgggcttgaaggcaggtggctgtgtgggtctcgctgcaggggtctctgtgccctgcaaggtgtatgaccagttgcagtgaggcagcaggttttgggttcaaatcctgtgctagcctctggccagctgtgcaccttggcaacactttccctgtcacgggattggggaaggattaactgaaagaaccttaggatgtgcctgtctacaatgggccctccataaatgtgaacaaatgtgggcttcctttccttttgtttgggccacatcatcccttcccctccatctgtggctgaagctggaatgcagaagagtgcctcatctgactgccttctggtacctggctgatgccatgagaaaggaaggagaaaggggtctttttttttttgaaatggagtctcactctcttgcccaggctggagcgcagtggtccaatcttggctcactgcaacctctgcctcctgggtctagagattctcctgcctcagcctcctgagtagctgggactacaggtgtgtgccaccatgcctggctaatttttgcatttttagtagagacggggtttcaccatgttggccaggctggtctcaaactcctgacctcaagtgatctgcctgcctcggcctcccaaagtgctgggattccaggcgtgagccaccgcgcccggccgagaaagggatctattaactcccatagagttgttctttgctaatttcttgaaggctcagaggacccccgcctcaccttcctgattctcctgacctgtcattagtacttgccccacgaggaatgtagcagggcctgctggctggcaaagcaactcatgcatgtgaggctctgaggccagtgacaggactgcttcccctgtgaggaaggtctggtggcccaacagcttttaggtgctgtctgctctacagcactgcctcctgagagaggtctcatgcctgcctgatgcccacttggtcctctcctgcctccttccctccctgacaacccacttggaatccaatagcatctcaaacttcacttgttccgaactgagttctggagtcccttctgagccactgctcctcccctggcttctctggcctggtaaaagggcaccttccatccacccagtgcccaaggagtcatgcttcttttctctcccttatctcctacaccctcaaaacaccaggaatctggctgcctcctgccatctctgtggttcccatcctgaccatagtcatcctgtctcctgggctgtggcctccttactggtctcccagttttcatcctggcccctccaaagtcctcacaaccaccagagaagtctttaatgtaaatcagatcctcttctttccctgccggaaccttccagtggttccctgtttcactccaactaaaacccagagtcctttcctacagcactctacatgagtggcccctgccacctccttgaccttgacaatctctgcccctttccctagcttgcttgcttttttttttttttttcctatgatggagttttgatcttgtcacccaggctggagtgcaatgggatgatttcagctcactgcaacctctgcctcctgggttcaagcgattctcctgcctcagcctcccgagtagctgggattacaggcgcccaccaccatgctaatttttgtatttttagtagagaaagggtttcaccatgttggcgaggctggtctcaacctcctgagctcaggtgatccacccgcctaggcctcccaaagtgctgggattataggcgtgagtcacgcagccagccatccctagctttcttgacctagaccacactgacctgctttctattcttcaaacatgccaagctcattcttgttttaggacttttgcatttaccatgctctctgcctaaaacaccaatcttctcagagcctgagaacagctcagctgtgttctgcacgctagttcagaaaggcttctttgaccccctagttcaagtagcatgcctgtctccaggggctctgtctcattacctgctttactttctttagagcctttattgctatctggaactcttatttgggtattaatttactgatctgttatttgtcccaccccattagaatataaattggatgtggcatagaccttgtctcttttattccctgcagcactccctgatgggggcggcagaaaagtaacgagcaaatacatctataactgcaaattgtggtaactcctacataaacaactggcagcaattgcttatatttgaggcacttaaaaatttttaagctggctgggcgcggtggctcatgcctgtaatcccagcactttgggaggccgaggcgggcagatcacgaggtcaggagatcgagaccatcctggctaacacggtgaaacctgtctctactaaaaatacaaaaaattagccgagcgtggtagcaggcgcctgtagtcccagctacttgggaggctgaggcaggagaatggtgtgaacccgggaggcggagcttgcagtgagccgagattgcaccactgcactccagcctgggtgaaggagcgagactgtctcaaaaaaaaaaaaaaaaaaaaaaaaagaaatttttttaagctgctgggcgcggtggctcacgcctgtaaatctcagcactttgggaggccgaggtgagcggatcacctgaggtcgggagttcgagaccggaacatggtgaaaccctgtctctactaaaaatacaaaattagcggggcgtggtggctcatgcctgtaatcccagctacttgggaggctgaggcaggagaatcgcttgaacccaggaggcagaggttgcagtgagccgagatcgcgccattgtactccagcctgggcaaaaagagtgaactccatttcaaaaaaaaaaaaaaaggccaggcgcagtggctcacgcctgtaatcccagcactttgggaggccgaggcaggcggatcacgagttcaggagattgagaccatcctggctaacacggtgaaaccctatctctactaaaaatacaaaaaattagccgggtgtggtggcgggcgcctgtggtcccagctactcgggaggctgaggcaggagaatggtgtgaacccaggaggtggagcttgcagtgagccgagattgcaccacagcactccagctttggtgacagagcgaaactccgtctcaaaaaaaaaaaaaaaaaaaatttaagcttagaggccggccacagtggctcagcactgtgcaggccaaggcaagaggatcacttgaggtcaagagttcgagaccagcctggccaacatggtgaaaccctgtctctactaaaaaatacaaaaattggccaggcgcgttggctggcgcctgtaatcctagcaacttgggagaccaaggcaggcagatcacctggggtcaggagttcaggaccggcctggccaacattaaaacatataaaaccccgtctctactaaaaatataaaaattatccaggcatggtggcgtgtacccgtaatcccagctactcgggaggctgaggtaggagaattgcttaaacccgagaagcagaggttgcagtgaaccgagattacgccactgcactccagcctgggcaacagagcgagactctttctcaaaaacaacaacaacaacaaacaaacaaattagccaggcatgatggtgggcacgtgtaatcccagctactcgggaggctgaggcaggagaattgcttgaatgtgggagatggaggctgcagtgagccgagatcacaccactgcactccagcctgggcgacagggagactctgtctcaaaaaaaaaaaaaaaaaaaaaagtttataaggctgaattaccgtactgtcaaaacaagctgctatctgagccgttttaagggtgaggaagtctggaaactgataacttgcccaggacacacagtgagttcaaggcatggaactcagtctcctatcttaagaatgtatgtgggccgggcatggtggctcacgcctgtaatcccagcgctttgggaggccaaggcaggcagatcatctgaggtcaggagttcaagaccagcctgaccaacatggagaaaccctgtctctactaaaaatacaaaattaaccaggtgtggtggtgcatgtctgtaattccagctactcaggaggctgaggcagaagaatcacttgaacccggaaggcagaggttgcgatgagccgagattgtgccattgtactccagcctgggcaacaagagtctggaactctgtctcaaaaaagaaaaaaagaatgtatgtgtagcaggctttttttttttttttttcccccgagacggaatctggctctgtcgcccaggctggagtgcagtggcgcaatcttggctcactgcaagctccgcctcccaggttcacgccattctcctgcctcagcctcccgagtagctgggactacaggcacccgccagtacgccgggctaattttttgtatttttagtagagacggggtttcaccgtgttagccaggatggtcttgatctcctgacctcgtgatccacccgcctcggcctcccaaagtgctgggattacaggcgtgagccaccgtgcccggcctatgtgtagcaggctttaatggtgggcctgcagccatgtcatggaaagaagctgacctgaagatctcagttctttcttcttctactaactagcaagcatacctcagtttcttctttaaagcgggatgatccgattattatcatgttggggttcactttttattttttcagtgtgtcccaaagcagcagcacgtttaggtatagccctcttgctatcagcttgagggccttagagccaggaagggagccaggacatttataggcacagaaactagggtcacatacagatccccccaccgcatgtgctaggggtacatgcagaccttcccagtgctgaccaacctgcagagaagaaatgggccctaggtattctggatctgattctttttggtcttcaattatttttatttttatttttttagagacagggtctcgctgtgttgcccaggctggcctcgaacagctgggctcaagcgatcctcctgccctagcttcttgagtagctggtggtcatcaattcatttttagcaaattctgcagaatttttttttttttttttttttttgagacggagtctcactctgccgcccaggctggagtgcagtggcgtgatctcggctcactacaacctccgcctcttgggttcaagcaattctctgtctcagcttcctgaatagctgggactgcaggcgcccgccaccatgcttggctaatttttttgtattttcagtagagacggggtttcaccatcttggccaagttggtattgaactcctgacctcgtgatccatccgcctcggcctcccaacgtgctggggttacaggcgtgagccaccgcgcccgggttctgcaggaattttggagagactcaggcagtaataaaataggatgtttacagaaattaaagatggcggccgggcgcggtggctcacgcctgtaatcccagcactttgggaggccgaggcgggcgcatcacgaggtcagtaaatcgagaccatcctggctaaccccgtgaaaccccgtctctactaaaatacaaaaaaattagccgggcgtggtggcgggcgcctgtcgtcccagctactcaggaggctgaggcaggagaatggcgtgaacccgagaggcggagcttgcagtgagccgagatcgcgccaccgcactccagcctgggcgacagagaaagactccgtctcaaaaaaaaaaaaaagaaattaaaggtggctggacacattggctggtgcttgtcatccgagctacttgacaggcggaggcagggggatcgcttgaggccaggcgtttgagaccagcctgggcagcatcatgagaccctgtctctagaaaaaataaaaaaattagctgggcatagtggcgcaggtttgtagttccagctaccggggatgctgaggcgggaggattgcttgagcccacgagttcgaggctgcagtgaactattattgcaccactgcacccaacttgggtgacagagaccccatctgtttgtttgtttgtttttgagacagagtttcgctcttgttgcccaggctggagtgcaatggtgcaatcttggctcaccgcaacctctgcccccaggttcaagcaattctcctgcctcaacctcccgagtagctgggattacaggcatgcgccaccatgcccagctattttttttttttttttgtatttttagtagagacgggattttctccatgttggtcagtctggtctccaactcccgacctcagttaatcccccaaattggcctcccaaagtgctgggattataggcgtgaaccactgtgcccagcccgagaccccatctcttaaaaacaaaataaaacaaaacaaaaacggccaggtgtggtggctcacacctgtaatccccaaacttgggaggccgaggcgggtggaccacttgaggtcaggagtctgtgaccagcttgccaacatggtgaaaccccatctctactaaaaatacaaaaattagctgggcatggtggtgcgcacctgtaatcccagctactcagaagggaggctgaggcaagagactcaattgaacccaggaggcggaggttgcagtgagccgagattgccccactgcactccagcctgggtgacaaagtgagactcgctctcaaaaaaaaaaaaaagaagaaattaaagatgaaagaaaacaaacattccaaaaagttgagaaagaattgccttttgtccagccccactcccaaccccccaaccctgttgtaatgtgtgatctgttttcttccagtctcgtttcctctcagtccatccacccttcatggggccagagccctctctccagaatctgagcagcaatgccgtttgctgaagacaagacctataagtatatctgccgcaatttcagcaatttttgcaatgtggatgttgtagagattctgccttacctgccctgcctcacagcaagagaccaggtgagcaagggaagtgacagcccgacactggcctgggggcagggctgtggaattcaaagctcagccccatcctagttcctcacccaagcctgggctggctccttccttcttcctcttgctgtgtcttgctccttgtccttgctgcttttcttttttttttttttttttgagattgagtctcgttctgtcgccaggctggagtgcagtggcacgatcttggctcattgcaacctccgcctcctgggttcaagtgattctcctgcctcagcctcctgagtagctgggattacaggtgcgtgccaccacgcccagctaatttttttgtttttaatagagacggggtttcaccatgttggccaggatggtcttgatctcttgaccttgtgatccgcctgcctcggcctcccaaagtgctgggattacaggcgtgagccaccgcacccttgctgcttttctaacttttggatggagtgtggctcagggtggcgttgctgacttcgccgagctcccccttgtgttgcttttgtgcactgctcaaaaatatggcgctggctctctgagatttcctggctctggtccacttgcccactttttttggaacctcctatttccttcatctctcttgcccttccttgtcctgctcagttttgattccattctccttgtcatggggccctgtcctggcacggagctgggactcaggtttgagagctggcaggatcagggtcgctctagccccaacagaacttgctgcaggcccctggcactcactagctggtgaaacgggcacaacccctccccgttgtagctgctgttctcagattggacccctgtgctccagagggtacctgttggctcttttggggcctcctgtcctcagatttctcaggagccccattgttgtctccgctgtcctcccacacagatcgcattagtatgcaggtctgtttggagtttgctcctccctcttgtattttggggtttatagggatatcttgttttatagtaaatattttctgtgggttttctttattttctttaaaaaatttttttttgagacggagtctcgctgtgttgcccaggctgcagtgcaatggcatgatctcagctcactgcaacctctgcctcctgggttcaagtgattctcgcgcctcagcctcctgagtagctggggttacaggcgcatgccaccacacctggctgattttgtatttgtagtagagatggagtttcaccatgttggccaggctggtctttatttttatttttgagacagagtcttgctctgtcactcaggctggagtgcagtggcacgatttttttttttttttgagacggagtctcactctgtcgcccaggctggagtgcagtggtgtgatctcggctcactgcaagctctgcctcctgggttcacgccattctcctgcctcagcctcttgagtagatgggactacaggcgcctgccaccatgcccggctaattttttgtatttttaatagagacggggtttcactgtgttagccaggattgtctcgatctcctgacctcatgatccacccgcctcggcctcccaaagtgctgggattacaggcgtgagccactgcgcccagcattttttttttttttttttttgagatggagtctcgctgtgtcttccaggctggagttgcagtggtgccatcttgggtcaacctctgcctcctgggttcaagcaattctcctgcttcagcctcctgagtagctgggattacaggtatatgctaccacacccggctaatttttgtgtttttagtagagacggactttcaccatgttggtcaggctggtcttgaactcctgaccttgtgatcctcggccttccaaagtgctgggattacgggtgtgagctaccgcacctggctattttcctttttctaaaaatctagctcctgcaggattctgtgggtttttgtttctgctgtctggttgcttgtttttatgtgagaattcaggtagacataaaaactctagggctgggcacggtggctcacgcctgtaatcccagcgctttgggaggccaaggcgggtggatcacctgaggtcaggagttcgagaccagcctggccaacatggcgaaaccatgtctctactaaaaatacaaaaaaattagccgggtgtggtggtgggctcctgtaatcccagctactcgggaggctgaggcaggagaatcgcttgaactcaggaggcagaggttgcagtaagctgatatcacggcactgcactccagcctgggcgacggagtgggactccgtctgaaaaaaaaaaaaaaaaaagaaacaaaaaaactctgcagccactgtcatctgcccacaatctccccagcattctcagcttccttgtttgttattgtcggccccctctctttccgtcttttgcccctttcatcatacttttgctatctaccttttccttctctcctaatccaaacctttctttttgccctgggggccatattaatccaaggcttttgtatcagattaactgggtttggattcctgccccactgttttaggatctttgctacagtactttgcttctgctaagcctcagtttcctcattagtaaagtggagataataatggcattaaataaagatgatacatgcaaagcccttaatggagagcccaggacatagttaattgccagtttccggcagctgcctttattgatgtggctgctaattgctcttcctcactccatacctggccctgtcctgggctccgatccagtttcacgtggctgccttgcccttgtggctttcttggcacccctccccccgctgtggcttcattctgggtggggaagtggcaggggccacctggcttgagcaggacagtggcattgtgtcttccaggatcgactgcgggccacctgcacactctcagggaaccgggacaccctctggcatctcttcaatacccttcagcggcggcccggctgggtggagtacttcattgcggcactgaggggctgtgagctagttgatctcgcggacgaagtggcctctgtctaccagagctaccagcctcgtgagcgtcctgcccttgccctcctggacccccagcctgctccctggcctccgctctccttttctctctccctgtacttcctgcctttctctgtcatcctctttcttgtcactgtgaagcgatgaataaacctgggtgtagatccaggctgagccacttaccagctgtgtccctttggccaagtcccttaatttccctgagcctcaggcctctcttctgtaaaatgaagctcatggcagcatctgccgcggggagctgcagtgggtgatactgcgggacgatgcgtgttgagtattgagctgggctgggcacttcctgtatgcccagcacatggagtctcccctaactttcacggctgtagcattcgcctcccacccttcctcatttcttctcccccacctactcattcaccctccctctctcctccttctcttcccctcccctggtttaccctgagagccttcgacgccctctatcagctgcccagttattctttaagtccctctcagtgtccctgccactctgagtgctcggaggcgatttgatgagattgagtttgatcctgagtgagatcaagacatgggaggaggctgggcgcggtgtttcacacctgtaatcccagcactttgggaggccgaggcaggcggatcatgaggtcaggagatggagaccaccctggctaaaacagtgaaaccccgtctctactaaaaatacagaaaattagccgggcatgttgtcccagctactcaggaggccgaggcaggagaatcacttgaaccagggaggcagaggttgcagtgagctgagatcgcgccactgcactccagcctgggcgacagagtgggattccatctcaaaaaaaaaaaaaaaaagacatgggaaaaaaaatcaagccagccctatttatatttcaaactagaggtaacccccgagaccctggtcacatttatagctgtgggacatccatgtttttcttttctttctctctcttttttttttttccttttagagacagagtcttgctgcgccacccaggctgcagtgcagtggtgcaatcatagctcactgcagccttgacctcctggactcaagtgatccttctacctcagcctccagagtagctgggactacaggcatggacaactacacctggctaatttttaaattttttgtagagatgacatctcactatgttgcccaggctggtctcaaactcctgggctgaagcgatcggcctcccagagtgctgggatcataggtgtgagccaccgcgtctggctctcatgcttgcttttctctcctttttcccttccttgcttttcctccctccctccctcccttcctctcttccttcctttttttccttccttctttttaaatatgtctcttcatgtgtggagattaatagtgatccctggctgggcacggtggctcacgcctgtaatcccagcactttgggaggccgaggcgggcggatcacaaggtcaggagttcgagaccagcctggccaatatggtgaaaccctgtctgtaccaaaaatacaaaaaaattagctgcgcatggtggtgcaagcctgtaatcccagctacttgggaggctgaggcaggagaattgcttgaaccggggaggtggaggttgcagtgagccgagattgcgccactgcactccagcctggatgacagagtgagactccgtctccaaaaaaaaaaaacccaaaaatagtgatcccctgaatacaatggctgtggtagggcctgatgaggggtgggggcaaaggggaggggctcaggtggcagcatcagggcaggggtcagtgagcaatgatagtcatgtggaggagaaagccactgggtcctaggatgcctggggacagagaagagtgactgctgacacggcgtgggtgactagagacccacgaggcccccccatactccccttcctcccttgctaccttgtcctccatctgctctcaccctcccactcctgcccccttgccaagtgatgcttgtcactccttttttttttgaaatggagtttcgctctgtcgcccaggctggagtgcagtggtgccatctcagctcactgcaagctccgcctcccgggttcacgccattctcctgcctcagcctcccgagtagctgggactacaggcgcctgcaaccatgcccggctaactttttgtattttttagtagagatggggtttcaccgtgttagccaggatggtctcgatctcctgacctcgtgatccacccgcctcggcctcccaaagtgctgggattacaggcgtgagccaccaagcccagccctgcttgtcactcttgaggagtgggcccacatcagaacagcttttggacctatgggtggggcggggggtgtacccaagagcacccaagcctctttaatcatgaggagaacccccaattcctttttttttgagacagagtcttgctcagtcgcccaggctggagtgcagtggcatgacttcggctcaccacaacctctgcctcccgggttcaagtggttctccttcctcagcctccctatagtccctgattccttctattttttttttttttttttgagacggagtctcgctcttgttgcccaggctggagtgcaatggtgcaatctcaggtcatggcaaccttcacttcccaggttcaagcaattctcctgcctcagcctctcgagtagctgggattacaggcatgcgcctccacgcctggctaattttgttatttttagtagagacagggtttctccatgttggtcaggctggtctcgaactcacgacctcaggtgatccacccacttcggcctcccaaagtgctgggattacaggcgtgagccaccacgtctggcttctttttctttttttcccccgagacggagtcttgctctgttgcccaggctggagtgcagtggcgcgatctcagctcactgcaacctccgtctcccaggttcaagcaattcttctgcctcagcctcctgagtagctgggattacaggtgcttgccagcacgcctggctaatttttgtatttttagtagagacggggtttcactatgttggccaggctggtcttgaactcctgacctcctaatccacctgccttggcctccccaaatcctgggattacaggcatgagccatcgtgcccagcccctgattccttctttttttttctttctttttttttttagacggagtctcgctctgtcgcccaggctggagtgcagtggcgcgatcttggcttactgcaagctccgcctcccgggttcacgccattctcctgcctcagcctcctgagtagctgggactacaggggcccgccaccatgcccggctaataataatgttgtatttttagtagagatggggtttcactgtgttagccagggtggtctcgatctgacctcgtgatctgcctgccttggcctcccaaagtgctgagattacaggcatgagccactgtgcccagccctgattccttcttgatatcactacatctttgtcctctagggacctcggaccgtcccccagacccactggagccaccgtcacttcctgctgagaggccagggccccccacacctgctgcggcccacagcatcccctacaacagctgcagagagaaggagccaagttaccccatgcctgtccaggagacccaggcgccagagtccccaggagaggtctgtcctcatagtctaccttgagccaccacttttgtgttcctatctgcccacttctgcccattgagccttccagaaaccctctcccgtcccctataaatcacgcctaatctctgctcagaaccctagggcttcctcagtggggatctgccccagaccagcttccaggctgctgaccaggtcttcaccctgtggcagccctaatcctctgtcagcaaccagctgggagaccacagttttgtgtgtgtgtgtgtgtgtgtgtgtgacagtgtctcattctgtcacccaggctggagtgcagtggagtgatcttggctcactgcaacctctgcctcctgggttcaggtcattctcctgcctcagcctcctgagtagctgggattacaggcacccaccaccacgcccagctaatttttgtatttttagtagagatggggttttgccgtgtcagccaggctggtctcgaactcctgacctcaggtgatctgcccacctttgcctcccaaagtgctgggattacaggcgtgagccaccgcacctggcaatgctgtgtgttttctgtgaggtagacgtaaggacacctgtggacagagggtctgggaattaccagaacccaggcaagggctcccctggctcctgtgctccatggtgtgggctgaggcctataggagatgccccaagagcacaagctgccctttgtgagctcttgggagaggcaactgccttattcatattttccctcattgcagaattcagagcaagccctgcagacgctcagccccagagccatcccaaggaatccagatggtggccccctggagtcctcctctgacctggcagccctcagccctctgacctccagcgggcatcaggagcaggacacagaactgggcagtacccacacagcaggtatgcatggaatctggaattatagggtccttctgatctctcaagtgagggtaagaattagagttgccccatctggcttccttgaacaggagacaaggtgggaataaagggagttcaacccaggaagcaaaccagttccttagtgggtgtatcagttagcatttgctgtgtaacaaatagtccactccagttttccaaattttttttttagtagcttaaaatacagccatttatttagcatatgatcctgtgggtcaggcatttgggctacctacatgggcatttcttctggtcttggctgaatttcctctcaagtactcaccggtatatacataagttctgcctctggctgtttgctgagcaccttggttctcttctatgtagtctctcatcctccagcacacaaacccatcatggcagctgggcagagttctcagagagggctcaaaactggcacagtgtcccctgtgctccattctgtgggcaaaagcaagttataaggccagcctagattcaaggagtagggaaatagactccctccctagacgggaggactgacaggcacagtgcagtggggctgggtggagatgagcgagataagtagggccatttttgcgctctgccaaagggactgtagggaacagccagggcctatagggcagtgggagagggacagtgaagggctgcatcagctgttggcaggggaacctttaggcactgtcttaccgcagagatctccagttcccagtgaatcatgaaaacttctcagtccccagaggaagtaaggtcttcatcatccagtggcctggactcaactccagatgtcagtgctccccctcagaaatatatagttgtccatctggacctctcaggccagcatgtctctttcctacttcccaaactattccacatgacgctggtgcccagtcagccctcagtgccctgggacagccacaagacacatgagcagttagaggctgggagacgtcatcttagtacttttgtcatccccaaactgctccaagcacctgtctgctttgcagtgtcacctggccacgggatgcctttcaggagttgctgtagaccacagaggcagagggcgcttaggtttcagtacgtttgtagacacaggtcccatgagattctgtggtattagattgtggtgggggagctgtacatcagaatcaccctgacttttgccagctgtggggcttggcatgtgcattccgagttccgtggagagtcctgctgcaactgcctttacagaccatcaccacctgctatcctctgcttcccccacccaggtcaggcagcctcccaggggtggctttgtccttgtcccctctcttcccaagcctccgggatggccaggcctctcggctggtgtgagctgttctgcatgagccatcctgccaccccttgccctgatccatggctgctcccactcatggtggtaggagagggacagcagtgggggaagtgtccaggattgcatgaggctaaggtcaaagtagaaaaggtagacacaggagaggggaggtttcccaggtgggagaggaaaaagcggagagaataattaataatggtcttcaggctcctaggtaccatttcactgtgtgccaggacagacctggggctacaggtcaaggactgagggcagctgttgggctttcaggccaggaagcagtgaccaaagggactgtggcatctcctccaagggcaggagatttggaggcctagacacagtagggaccatgagatctgggccagagggacccttctccaggcctcaaggtaatggtctttgggtctgtgtttccacttgtgtttttccaccggcaggtgcgacctccagcctcacaccatcccgtgggcctgtgtctccatctgtctccttccagcccctggcccgttccacccccagggcaagccgcttgcctggacccacagggtcagttgtatctactggcacctccttctcctcctcatcccctggcttggcctctgcaggggctgcagagggtaaacagggtgcagagagtgaccaggccgagcctatcatctgctccagtggggcagaggcacctgccaactctctgccctccaaagtgcctaccaccttgatgcctgtgaacacagtggccctgaaagtgcctgccaacccagcatctgtcagcacagtgccctccaagttgccaactagctcaaagccccctggtgcagtgccttctaatgcgctcaccaatccagcaccatccaaattgcccatcaactcaacccgtgctggcatggtgccatccaaagtgcctactagcatggtgctcaccaaggtgtctgccagcacagtccccactgacgggagcagcagaaatgaggtgagtcctcgcccttcctggcagggatcctggccccttcccccgggacagcttgcccacctggccctggccttggccccttcccagtctgcattctgtgtccagcctgtgctgctctgtggcctctccttgagggcatacagacagttgagaaccagcctcatgcaggccccacaccatgttctccaggaggaacagtcattgagcttctaagtctggacacctcaggagggtcagccacagggggcacccactggtcaggtgtataagttcatttagggctcgtagttcctagtgaagccgagcggtgccgttttgcacataaggaagcagtgacggggacagcacagtggcccatctgcctcttgccttgctcttcaccaggatgcctggtgtgtccctccatggccaggctttacagaacgcagtcccacctggagcagccactcggacccagcagccccccattgttgcctgctccaagcctcacatctaaccctagctgcggctgtctgctgggaagagccaagtccatagggccctttgggcacatggccaggcctctgaccctgtggctgctctctagttctcaggcccaggcaggatgtcagtgcaggatggagccccgccctaccaaaggcttccaggtgggcatgagctcacaggcaggccagggagtagggaaaggctgccctggaggaggccaccattggtgcagattcttggtcccctctacccccactgctccaagaaaaggtggcctaggggcattatagattgggaattgaggggttggagtgttagttcatgccctggcctgggaatgggaccgccctaccaggttcgtctccctgccaaccccagtcccttccagtgctctcctttctttcccaggagaccccagcagctccaacacccgccggcgccactggaggcagctcagcctggctagacagcagctctgagaataggggccttgggtcggagctgagtaagcctggcgtgctggcatcccaggtagacagcccgttctcgggctgcttcgaggatcttgccatcagtgccagcacctccttgggcatggggccctgccatggcccagaggagaatgagtataagtccgagggcacctttgggatccacgtggctgagaaccccagcatccagctcctggagggcaaccctgggccacctgcggacccggatggcggccccaggccacaagccgaccggaagttccaggagagggaggtgccatgccacaggccctcacctggggctctgtggctccaggtggctgtgacaggggtgctggtagtcacactcctggtggtgctgtaccggcggcgtctgcactagtgaagccctgggctcttcccaccacccatctgttccgttcctgcagtacacctggcccctctccgaagccccttgtccctttcttggggattgtggaggctgggtcagaggggagttaagggactgcaggcctggcagcaggacatgccttggctgaaccaagtcctgagagcagcatctctgtccccacggtgccttgtgtgggtccccgtccttggctttctgggtcctgggctgcccccagtgctccagaccttccccactggcaatccaggttatcatccatgtcctccagaggagcttcctcctccaggcctcagccctgttggcccaggtggagcaggagggaccactggaacatgtggtgcttgggaatgcctctcctgttgcattggtccctgaaggcctcagggcaggtatgtggtgtgtgggcgactccacaagacctgcctcccatcctggcagcccagcctgagaccgttgcattgaggcaggcaggagcggcagggtggctgctctccaggagcccaactgccttgagttcctgccccactgggccccctcccctgctgggcaatcctgggaaggtctggaggttcctgtggacctcagggaagccaggggcagctgtcaggcctgaggaagacctgtggagctcctctccagcctcctctttccctcccctctggtctccattctcttcagctccctacatgggctggggaggagacacctggtgggcagagctcaggcagaggtttggatttcagctccctcacttccggggctgtgtggctttggcagatgtcagacttctggtcttgcttctccacgtggacagtgagtatctggctcattcttcactgggttcttctgagattgaacctacaggtgtttgccaagtgcctggcccagagcaagtggccactgcttctcccatctctctcctgcccaacctggtagagctgagggcatgagaggcagagtgcacagtggtcaagggtgcagctctgcagcacaggcagcctaggcctgcgtcccaacctgcctctcaccagctctgtgaccttgggcaagggatttatctgtctgtcccttagttttctcacctgtaaaaggaggataagtatatatatatatttcccagtgttgtgaagattaaaggagtttatcgatgtaggtcttaggatgagtcctggcatttaccaagggttggatatatgttattatcactattaagtgttgagggtccaggcatgctgggcaacagggaccccatctctacaaaaaagtttaaaaaattagccaggcgtggtggtgcacctgtcgtcttagctacttgggaggctgaggtgggaggatcacttgagcccagaagcttgaagctgcagtgagctaggatcgtgccactgcactccaacctgggtgagagagcgagaccctgtctcaagaaaaagaaaaatgcagagaaacaggagtcttggctactcctttagaggcagactcagaccctcctgcctcacagctttatctttgtatttgccccttactttatcttgtgccttgagaaattgctggggagagaggtatgtccactgggcagctgtacaggatggaggatatagggcgtttccactcccagcagccaggttccctcaccccaagctcacccactgttggggagattatctacaataacaccagaaacacattggggtggattgggggtatccttatgggttcttttcagggaaccattgctggacaaggcacaggagccacctccatttctgagctctgcaagggacaagaactagagccatcaggggctgggctcactgtggccccaccccaagccgtcagcctccagggatctacaccctgccttggctgctacagctttttcactccactgccctaggggagttcagcaacctaatgatctctatctctgaacatctcttcatcccatgctccaagtccagcaacctgcaccctggaaccaggagtggaccctacccgagctgtctgtattaatccccatcccccaccaccaatcttaaaaagccctctgtccccctaccctaaaccccagttaggtacccatgctgggcaggtcagttaacaatttatgcacaggtactagttttattgtattaccgttccagggtagctttgaaaaaagtatctcaaaaaggcaacatgggccgagcgcagtggctcacgcctgtaatcccagcactttgggaggccaaggtgggcagatcgcctgaggtctggagttcaagaccagcctggccaacagggtgaaaccccgtctctacaaaaataagaaaattagccaggtgtagtggcagacgtctgtaatcccagctattcaggaggctgaggcacgagaattccatgaacccaggatgcggaggttgcagtgagccgagattgtgccactgcgctccagcctgggcgacagagtggtattctgtttcaaaaaaaaaaaaaaaggcagtatgtagccccgaagactgttgcccaagtggtagaatgttagcacactaccagcctaggtaaaaaatacaaaaagtaactgggcatggcggcgcccatctatagtcccagctacatgggaggctgaggtgggaagataagtcacttgagcccgccaggaggcggaggttgtagtgagctgagatcgcaccactgcactccagcctgggtgaccgagtgatactctgtctcaaagaaaaaaaattataattttagcacagtaaccagccatgatgggagataccctgggtaaggcatgtagaaagggttgagggaccttcccagtcccctagccccgcctcccatcctcccatctttttcttttttcttttttttagagaatcacccagcctggagcgaagtggtgcaatcataactcactgtatccttaaactcccgggcttaagcgatcctcctgcctcagccttctgagtaactaggacttcaggtacctgtcaccatgcctggctaattaaatttttttttcttttttttttttgagatggagtcttgctctgtcacccaggctggagtgcagtggcgcgatctcagctcactgcgacctccacctcctgggttcaggccattctcccgcctcagcctccagagtagctgggactacaggcgcctgccaccacgcctggctaatttttttgcacttttagtagagacggggtttcactgtgttagccaggatggtctcgatctcctgaccttgtgatccgcccgcctcggcctcccaaagtgctgggattacaggcgtgagccaccgcgcccagccaaattaaattttttatagagatgaggtcatgctgttatgttgcccaggttggcctcatgagatcttgccttagcctcccaaagtgctgggattacagatgtgagacactgcacccaaaccccaccacttttttttttcctttttctttttttgagacagtcttactccgttgcccaggctggagtgtagtggcatgatctcagctcactgcaacctccgcctcccgggttcaagcaattctcctgcctcagcctcccgagtagctgggattacagaggcctgccaccacacccgactaattttcgtatttttagtagagacggggtttctccatgttggccaggctgttcttgaactcctgacctcaagtgctccacctgcgttggcttcccaaagtgctgggatacaggagtgagccactgcgcctggctgatcccagcacttttcaaatgatgccgctcaaagccgtgacttggcctactttgaacagcaaacttgttgctgctgttgtcaacctgaaggcctctcaaatgccagcttcaagcagggtgtgaattggccagtgtcagatctcaggagtcctgtgttgagagtgtggctttcagctgcggggagctgcacttggtggggaaagccaggcaggtcaccctcacagccagataatgtggaggtcagaacccaaggaagggagtgagacctccactcccagtgggggacctggccacccatccttggggacctgagaaagcgtacttcaccttggggtgaaggctgggtggggccagagggaccagtgccctcctcagtgcttaggggcagagccacctgcagcaatggtatctgcatattagcccctctccaccttctttctcccgctgaatcatttccctcaaagcccaagagctgtcactgcttctttctccctgggaagaatgcgtggactctgcctggtgatagactgaagccagaacagtgccacaccctcgccttaattccttgctaggtgttctcagatttatgagacttcttagtcaaatatgagggaggttggatgtggtggcttgtgcctgtaatcccagcattttgggaagccgaggtgggaggatcccttgaagccaggagtttgagacaagcctgggcaacaaagcaagaccctatctctaaaaaaaaaaaaaaaaaaaaaaaaaaaaaaaaaaaaaaaaaatctaggagatgctctttaccctgcctggcctcaaactattaatagcttcctttgagcaacattatttattatgaactttcaaacacaaaaaagtagagagagtagaataacaaatccccatgagcccatcacccaacttcagtaattatcaattcatggccatcttgttcacccctgcctgcttccctgcttcccctcattctgcagaggttcttttcttttgagacagagtgttgctctgttgcccaggctggagtgcagtggtgcaacttcggctcactgcaacctccgcctcccaggttcaagtgattctcctgcttcagcctctcaagtagctgggattacagatgcccgccaccacacctggctaattttcgtatttttgttagagatggggtttcaccatgttggccaggctggtctcgaactcctgacctcaagtgatccgcccgccttggcctcccaaaatgctgggattacaggtgtgaaccacggtgcctggccactgtacaggttatttatagaagttggagagtgaagggttgagaaagccaaggggcagatgcgggtctggaggattttgtgcctaaggccctctctttgctcccagacagcatgaagtaacaatgaggcatccacctcttggttttgtggcctctgtggatgacgtctctcaccttgaaccagttcagagttggagtagcgcaggatcctgtcttcagaggaggggccgaagcgggttcctctgttgtcaagctctttggaggtgcctggctgctactactgtcccagagaggtgatgatgaatgatgggtgtgtccagtggcagtttgccccactgaggcaggggcttccactaggccctgacagagcccttccagcaggcagaaatccctgtgctaggcaagattcaaactccgtagcatgtctcctgctcccatctcttaggaatggagtccttcaggccttgagtcccacattttccatgatgctccattaagcagctgatagcacccccacctccagggaaagtgagttcagagtccttggtctaatgcatctgtgttgaaattgaggccttcccctgtgttcacctttctgctctttttcttttagcccaaggctatgaaggcctcattcggtgctgggcatggtcactcctagcattcctcactctgttgctaacagcaacagcaataataataagggttacaacttactccataccttactgtctgccaggcattaagctaagtgctttacatatattaagtcatttaatcctcataatgaccctatgaaagagataccatctcaacccaattgacagctggtttgcaagattaggagggatgaaggacccaggggacaatgcgagggaaaactctgaccccggggccccaggctggatgttctttatgcctgtgaaccacagcttatcacatgtctggagttagggaccccacttaaagtgagattttggctggaggtggtggatcatacctataatcccagcactttgggagaccaaggcagaaggactgcttgaggccaggagttcaaaaccagtgtaggtaacagctagaccctatctctacaaaaaatttaaaaattagctgggtgtggtggtatgtgcctcaagttccagctactcaggaggctgaggtgggaggatcacttgagcacaggagtttgaagttacagtgagctatgatggcaccactgcacttcagcctaggcaacagagggagaccctgtctttaaagtacatagaggtttttcacaccaacacatctctgcccagtgtgccaacatctgccacctgctataatagtactataacactcaatatgtaattaatgtagtctcagggatgttatgacaatatgattacaactatcacgtgtgtgcccagccaggctcaatgccccaggctgggcgaggtggggcaggggacacagcctaaaatgccaggcctcaggaagccatttggtttagcagacattgtttattaaaggagttacctatgccagatcgaaggcctaagatgattaagacactatgagtgccttcaagtggttggggacgttcatgattgtggtacagacaaataggctttcacatcattcttttatgtaatcatacaacagatatttgcacctacatgtgcagagcactgtgataggcctcagtgacacagaataatacggcaaagaccccacccgatgagccccctcccaccacccaccagtacagtagggggtggtttaatggagtgttcctggaatatgaagtgggggcaggcattaggggtggcaaagggacaagtgtttatctgatcagttatgtactgtttataataagtaaatcagcagagggggaataatacttagaacctatagagagtaaatctgacaagatgaaatgctgatgaaaatatggaggaaatgaaactctcatgggttttgcagggaatctaagtcagtgctgtgttgtgaatgtaggtgtaccctttgaattcatatgttgaatcctaacccccaaagcaatggcattaagaggtggggcctttggggctgggtatggtggctcatgactgtaatcccagcactttgggatgctggcagggggcagatcacttgaagccaggagtctgagatcagcctggccaacatggtgaaaccccatctgtactaaaaatacaaaaattagccaggtgtgatggcgtacatctgtaatttcagccactcgggaggctgagacaggagaatagcttgaacccagtaggtggagatttcagtgagccgagatcgtgccactgcactccagcctgggtgacagagcgagactccatctcaaaaaaataataaagatgtggggcctgtgggaggtggttaggtcatgagggtggagatcatgaatggggttagcaccttataaaacaggcttgagggagcccttctgtcccttctaccatgtgtggatgcagtgagaaggcaccgtatctctgaagcagagagcccgccctggacactggatctgctggcaccttgatcttggacttcccagcctctagaactgtgagaaataattttttgttgtttacaaattacccaggctaaggtgtttcattgtaacctgaatggaccaagctggtgtgaccctgttggaaaactggcagtatctaccaaaagccgaacatacgtataaactgatccagcagttccactcctgggtatgtacaccacagaaagctatgtccaccgagacattggcaagaatgtttctaaccacacgctgactgtagccccaaacctgaaacaacccaaatgtccatccaccaacccaaatgtccatccacagttgaagctacagtgaagtcacagggtcgaatactactgcacagcaacgaatatgaatgaaaatatcgctatgcacagcaacatggataaatttcacagacatgaggtcaagcaaaagaggtcagagtcctcatcatcaagagagaattcattgtatgattctcttcctacaaaaagtacagaaataagcaaaactgatccatggtgttagaagccaggggaacagttaacaggggagggatactggggaggggcatcctggagtgctggtctacctcatctgggtgttgatttcacgagtattgtcagtttgtttccagactccctgttggagatgtggaaataaaaaccacctaaacaagagcagagaggccatttggtcaaagtttgcaaaggagtcagccatgattgcttgtatttggcaggggtcaaaggcaggcagggactgtgaaatgttatagtggaaaaaaagggaaggctctgggtgtgctgtgattggagattgttggcatggggacagagcggactaactggaggggcatctttggttggttgggggggtatatttggctttctctggttggtctggagttggaagagggggtgtggtggctggggattgggaagaagctggcagccactaagttcagactgttctgggtccgattgctgctgaggctgtggtttggcttccttggcttcccaggctggtcatgggtttctggccagagtctattgtcatatgtggcctggccattgtccagttgtatgttcagtctcttggaaggaagggtattgactctgagaggggccaccatcgctggaatgggggacacacagtacttcctccagctgcctacacccccctagggtcagtggcgcctgcctgtgagggtgagcccaatggctagagggctctgctccaagtcattgcttactacacccacaaacattcttcgttctttaaggcctaacttaaagcccagatcctacaggaaaccttgattagacccctctctttattaagcttcctaagatcaaaccctgcttttgtgtaaatgctgacctccttgcctacattttaaaaacctagagctgggcatgatggccccagcctgtaatcccagtgattcaggagactgaggtgggaggattgctagaagccaggagttcgagaccagcctgggtaacatagctagaccacatctcttaaaataaaatagttaatttagccaggcatgatgatatatgcctgtagtcccaactacttggaaggctgaggtgtgaggatctttgagcccgggaggtcgaggctacagtaagctatgatctcaccactgtactccagcctgggtgacagagcgagacccagactcaaaaaataaaaataaaaaccctgaatatcttccttctacttcttcagtgctgtttttatttaaaaaaaaaaaaaaccagccaaaaccacaactttttactgaagtgtaatgtaaatgctgtaaaaggcagtgaaaggcacaagggaggtggaggggtaggaagggtggaagtggcgggaggaagtggcagggcaggcaaaatgaagggaagccctgggttcttgtcctgcatccgcagccagctcccactttcctcaccctccaggacctgtaaactgtgaggctggaccagttatgtcaaatctgtcctcccccagagctcagtccctctgcccttgggtgtccttggcacaaggcaggctaggctgcaccagcttcctccatctccgtcctgcctcccccatccccaggtgccattcccacaccatctgaatcactgatttcctcgcaatcagacgctatcttccagttaatcacttcgcttgtatttaacataagaaagaaaaaccctttcattatcacatacagctggaaatcggcttcttgcaggaggcgtatccaaaggaattggagaagagataaactggtaattggtgaaagaattactttaattttttttcctacttgctgtcatgatgatgtccttagaattgtgagcccgtggacacttctgtacaataaatctgctattattacttctagaactacagttataatggtctacaatggccagatgcctgcttgtaatgagaagctactgcagtgaagatcaacagagtcagggggcttgtctgtgacctctcctccttttccctcctgccttctccctggggatgggtgggtttctacttaaagacaagctcccagctctcagacagagaatgtatgagagcaaaacagaagtcacagtcctttggtacttaatcttgaaagtgacatcccagcagttttttttttttttttttttttttaagacaagggcatgctctatcgcccaggttggagtagagtggagtagaatgtctcactgcagcctcaaactcctgggctcaagcaatcctcccacctcagcctcctgagttgctgggaccagaggcacacgctaccatgcctggctaactttcatgatttttagtagagatgcggtctcactgtgttgcctatgttagtctcagactgctgggctcaagtgatcctcctggctcagcctcccaaagtgctaggattacaggcaggagcctctgcatccactcccatcacttctgtaaattgcagtcaaggggcaatttacccagaagtaggaaccactggaagcaccattatagcagctgcctcttcaggaggggaatttgattctgtcctacaaaatgacatatgcatgtgttttttgacccagcaattccatttctagtagtctaagccaaagataacattggcaaaaataaagatatatgtccaaggctagtcattatagcccactgtgtaaatagcaaaagactggaaataactcagacaatgtccatctacagaacattggcaataaaccaaggtatatctacattggagtgctatgcagctgtgaatagaaatgagtatctctatactgctatggagtgaactccatgatgttttgctaagaggaaaaaaaaagtggaaaactgtatatataatatagaatctttgggctgggtggtggctcatgcctgtaatcccagcactttgggaggccggggcaggtggattatgtcaggagatcgacaccatcctggccaacatggggaaaccccgtctctactaaaaatacaaaaaaattagctggccatggtggtacgcgcctgtagtcccagctactcgggaggctgaggcaggagaatcgcttgaacctgggaggcagaggttgcagtgagtcacgatcacagcacttccaaaaaaaaaaaaaaaaagacctgactccagtggactgaaactcatcaaataggcttttaaaatccatgagttggccaggcgcggtggctcacgcctgtaatcccagtgctttgggaggccaaggcaggtggatcacgaggtcaggagtttgagaccagcctggccaacatagtgaaaccccgtctctactaaaaaaaaaaatacagtccgggtgcggtggctcatgcctgtaatcccagcactttaggaggctgaggtgggcggatcaccaggtcaggagattgagaccatcctggctaacacggtgaaaccccgactctactaaaaaaaaaaaaaaaaaaaaaaaaaaaattagccaggcatagtggcaggtagcctgtagtcccagctactcgggaggctgaggcaggagaatggcgtgaacctgggaggcggagcttgcagtgagccgacatagcgtcactgcactccagcctgggcgacagagactctgcctcaaaaaaacaaaacaaaacaaaacaaaaataagctagacgtggtggcacgcgcctgtagtcccagctactcagggggctgaggaaggagaatcgcttgaacccgggaggtggaggttgtggcgagccgagatcacgccagtgcacaccagccccggcaacagtgtgagactccgtctcaaaaaaaaaaaaaaaaaaaaaaaaaacaccaggcatggtggcgcacgcctgtaatcccagcactttgagaagccaaagtgggtggattctatgagctcaggagttcgagaccaccctgggcaacatggtgaaacctcctctctgctaaaatagaaaaaattagctgggcgtggtggcacttgcctgtagtcccagttactcaggaggctgaggcaggagaatcgcttgaacccagaaggcggaggttgcagtgagccgagatcgcaccactgcactccagcctgggcaacagagtgagaccgtctcaaaaaaaaaaaaaaaaagccaccagttcatgataatactaaaaagaattcattgttgacctctagaggatgccccaggaaaccaactcattctgaaaactggtcagtaaagggaaagaattgatcctgccttttctatttgagtagttccagctcctctggaggctgaggttgaggtacttcaggataacaaagagttgatgagggaagattctttatagaaatattccagttaggctgggtgcggtggctcacacctataatcccagcactttgggaggccaggcaggtggatcacttgaggtcaggatttcgagactagactggccaacatgttgaaaccccatctctactaaaaatacaaaagaaaagtagctgggtgtcgtggtgcacagccgtaatcccagctactcgggaagccggggcaggagaatcgcttgaacctgggaggaggaagttgcggtgagctgaggtcgtgtcactgcactccagcctgggtgacagagtgagactctgtcacacacacacacacacacacacacacacacacacacacaaattccagttaaccaagcatagaagaaactacctgattagaaaattacggtaggggctgtagcccctaacgtaagtagttaatgttatgaatttctcttctcttgatgagatgaataaaaagtaaatagtgagacatggtggctcacacctgtaatgttttcacttataagtgggaaccactttgggaggccaaggtgggaggatcgcttgaggccaggagtttgagaccagcctgggcaacatagtgagacccttgtctctaaaaaaaaaaaaaaaaaaaaaattagctgggcgtggtggtgcacacctgtacctccaggtacttgggaggctgaagtgggagaattgcttgaacccaggggtttgaggctgcagtaagctgtgactgcaccactgcactcttgcttgggtgacagggtgagaccccgtctcaaaaacaaaacaaaaatagaaaaataatgtttaaaaaggtaaatagcacctgtgaagaattcttttaaagaaatcaaacctgggccaggtgcggtggctcatgcctgtaatcccagcactttgggaggctgaggcaggcggatcacctgaggtcgggagttcgagatcagcctggccaacatggagaaacccatctgtaataaaaatacaaaattagccaggtgtggtggtgcatgcctgtaatctcagctactcaggaggctgaggcagaagaatcgcttgaacctgggaggcggaagttgtggtgagctgagattgtgccattgtacttcggcctgagcaacaagagtgaaactccacctcaaaaaaaaaaaaaaaaggcaaagcaatcaaatataatatgttaatatgttgatctcatttggaaactaaattgattttttaaaaaatttacttaagagactgggtcttggtatgttgcctaggctggactcaaactccttgtgtcaatcaatcctctcgcctcagcctccactacaggctttaagaaattagctctaagtccttatggtaggaaagctgtaactcaggttactggatcatggagaggccaggattaggtgacctgaaaaatgtgggcttggtctccatcatgattgtttaattaagactcttggttccagctgggcacggtggctcacgcctgtaatctcagcactttgggaggccgaggcgggtggatcacaaggtcaggagatcgagaccatcctggctaacacggtgaaaccctgtctctactaaaaacaaacaaacaaacaaaaattagctgggcatggtggcgggtgcctgtagtcccagctactcaggaggctgaggcaggagaatggcatgaacccaggaggcggagcttgtattgagccgagattgtgccactgcactccagtttgggtgaaagagcaagactccgtctcaaaaaaaaaaaaaaagactcttggttccaagtaacagaagacaatgtaagctagattaaaatatggggcgggagacttaataaacttattttaatgttgcggggggagacatatggaacacagacaggaatgtattcagcctagggaatggatagaaacaggcaggactgggagagctggcaaagtgctttttctgttctgttcatctgttcactcttggagctctgtgcaaacctacttttttttttttttgagatgcagttttgcactgtcacccaggctggagtgcagcggtgcgatctcggctcatttcaaccttggcctcctgggttcaggcaattctcctgcctcagcctcccgagtagctccctccaccatacccagctaatttttgtatttttagtagagatggggttttgccatgttggccaggctggtttcgaactcctgacctcaggtgatctgtctgcctcggcttcccaaagtgctgggattacaggcgtgagccactgcgcccggccgcaaaccaattttttctgcttctttgaccccacgaggaatgtggcatcacactttgagaagtaagtctctattccaaggtggtggggtttaggaggtacaaacatggctgttggggcctaatctatgatctataggaggaatggttgtaagttgggtagatgtcaaatatgtccactatgaagatgtagttttttttttgagacagaatctcgctctatcgcccaggctggagtgcagtagcgtgatctcggctcactgcaacctccgtctcccaggttcaagcaattctctgcctcagcctcctgagtagctgggattacaggtgccccgccgccatgcccggctaattttttttcgtatttttagtagagacagggtttcaccaagttggccaggctggtcttgaactcctgaccttgtgatccacccaccttggcctaccaatgtgctgggattacagacgtgagccaccacacccggactgtttttttttttgaagatggagtctcgctctgtcacccaggctgagtgtagcggcatgatctcagctcaatgcaacctctgcccaagatataggtattttaagggatcctaaacttggtattgtcactgcaatcattccttagcaaatggtgtgtgtgcactcacactctgaaaggtactgggggatgtaaagatgcaaagtcttaatctgatagctctcatatctagttgggattatacaacgtgtacaccaagaatcttaggaccaggaagtacgagaaatgccactgagagtgacataaggctgggcaaggtggctcacaccataatcccagcactttaggaggctgaggggggcggatcacttgagctcaggagtttcagaccagcttgggcaacgttgtaaaaccctgcctcttcaaaaaatacaaaattagccaggtatagtggtgtggacctgcagtcccagctacttgagtggctgaggtgggaggactgcttgagccggggaggtggaggttgtagtgagccatgattgcgtcactgcactccaccttgggtgactgagccagaccctgtctcaaaaaaaaaaaaaaaagggccaggcatggtggctcacgcctgtaatcccagcactttgggaggccgaggcgggcggatcacgaggtcaggagatcaagaccatcctggctaacacagtgaaaccccgtctctactaaatatacaaaaaaaagttagccgggcgtggtggcaggcgcctgtagtcccagctactcgggaggctgaggcaggagaatggcgtgaacctgggtggcggggcttgcagtgagccgagatcgtgccactgcactccagcctgggcaacagagcaagactatgtctcaaaaaaaaaaaaaaaatcagggttggccgggtgcagaggctcatgcctgtaatcccagcactgtgggaggctgaggtgggtggatcacctgaggttaggagttcaagaccagactggtgaaaccctgtttctactaaaaaatacaaaaattagccgggtgtggtggcatgcacctgtagtcccagctacttgggaggctgaggcaggagaatcacttgaacccaggagatggaggatggagtgagctgagattgcgccagtgcactccagcctgggcgatggagagacagactctgtctccaaaaaaaaaaaaaaaaaaaaaaaaagatcaggtttacagtgaactgtggtaatcaatgaagacattaaggaggaggtatcatttgggccatgccatagaagttggattggattttgataagcagaaatgtggcgggaaggaattttatgtagagatgtagagatgccctttgggaggctgaggcaggcagatcacctgtggtcgggagttcaagaccagcctgaccaacgtggagaaaccccatctctactaaaaatacaaaaattagctgggtgtggtggtgcatccctgtaatcccagctacttgggaggctgaggcaggagaatcgcttgaacccaggaggcagaggttgcggtgagctgagatagcaccattgcattccagcctgggcaacaagagcaaaactccgtttcaaaagaaaaaaaaaaaaaagatgtagagatgaaggatgagccaaagctgggtaagaataaggcttatctagagaattgtgagatttgttttgttagaacagttatgcaagcataataaagcaatgagaaaaagtgggaagatgctgggcgcggtggctcacgcctgtaatcccagcactttgggaggctgaggcgggcggatcatgaggtcaggagatcgagaccatcctggctaacacggtgaaaccccgtctctactaaaaaaatacaaaaaattagcccagtgtggtggcaggcgcctgtagtcccagctactccggaggctgaggcaggagaatggcatgaacccgggaggtggagcttgcagtgagccgagattgtgccaccgcactccagcttgggtgacagagtgagactccatctcaaaaaaaaaaaaaaaaaaaagaaaaagaaaaagtgggaagataccaaatggtggagctccttggatgtcaagttgtttgaacttcattctgtaggcaaagaagccaccataacctttttaacataggcgagattataaacaggagaatgctttaataagattaccctgggagctgtgggcctggagagtagagactagaggcagaacaaactcttaggaggccattgaaataaattactaattagagctttctgtttgtgatagccactagacacctgtggctatttatttttttcttttttttttttttgagacggagtcttgctctgtcgcccaggctggagtgcagtggcgcgatctcggctcactgcaagctccgcctcctaggttcacgccattctcctgcctcagcctcccaagcagctgggtctacaggcgcccgccaccatgcccggctaattttttgtatttttagtagagacggggtttcaccatgttagccaggatggtctcgatcccctgacctcgtgatctgcccgcctcggcctcccaaagtgctgggattacaggcgtgagccaccgtgcctggtacttgtggctattgactacttgaaatgtgactcggtgagagtgagatcctttttttttttttgagacagtgtctcgctctgtggtccaggctgagtgcagtggtgcgatcttggttcactgcaacctccacctccctggttcaggcgatcctcccacctcagcctcctgagtagctgggaccacaggcatgtgccaccacgcctggctaatttttgtatttttgtagagatggggttttgccacattgcccaggctggtctctaactcctggactcatgtgatccgcctgccttggcctcccaaagtgctgggattaagcaagggccatcatgcctggtcccgagatcacgtctcttaaaaaacaaataggctgtgtgcagtggctcatccctgtaattccagcactttgggaggccaaggtgggtggatcacctgagttggagttcgagaccaccctggccaacgtagcaaaactccatctctactaaaagtacaaaaattagccaggcatggtggtgtgcgcctgtactcccagctactcgggaggctcagtaaggagaatcgcttgaacccaggaggtggaggttgcagtgagccgagatagtgccattgcactccagcctgggcaacagagactccgtctcaaagaaaataaataaaataaaataaagtaaaagcactagactattagtagttaagagcaagttaacagtatccaaatcagggctatttagtcaaagataagatagactttgagcttgaaaactaagggaaaattttcatctctttcaatacttgggaagggacaggatcttccatatttaggaaactgagttgtcctaaactcactgtatttcatcttgaattttctctattttcctgagacaagtggaaactgtgaaagcagtcaatgctgttatattgcctgtgagctccgtcgaggccaccagaatgccatatgctagctatactatgcgtacgtatgtgcgcatataacacacatctctgccccttttcagcagtggactctgggatacaggccagaccttggaagagtgtctaggggcttaagaacttcatgttcttcatagctttgcctttttttttttttttttaaccccctcatacctttgtcctttgagagagacagttaagtaggtaaggtcttcccaagtcctcacaccattacactctggccaaaaggccttgtgtttgaaacaggcctgatctacacccctcatgtcctcggcaccgacgaaacacgatgacatgagaaagaacttggtgtttaagcctctgtgcctggcaatcttgtgatgtcttttttttttttttttttgagatggagtcttgctctgtcacccaggctcaagttcagtggtgccatcttggctcactacaacgtccgcctctggtttcaagtgattctcctggctcagcctcctaagtagctgggattagaggtgcccgccaacacaccaggttaatttttgtatttttagtgaagacagggtttcaccatgttggccaggcatgtctcgaactcctgacctcaggtgatccgcccaccttggcctcccaaagtgttgggattacaggcgtgagccactgtgcctggcctttgtgatgatatcttaatttttactgctaatgatgctctactttagctgcaagaaagctcaagggaagtctgcctcctggctcttagagagcaggaacagacgaagacgtgaatcattagggggcagaaggcggactatgggctccaagatggcctccagagattctcttcctcctgatattcatgtccttgtgtagtaccaacctacactgaatagggatgacctgtgtgataacaggatattgcataaatgatggagtataacttcccagcctaggtcataaaagacattgcgatttgtcgttttctcatccttcactagctctagggaaggcctgctgccatgttgaaaggacactcacgtagtcctatgaaagcctgcattgtgagctgaggcctcctgccaacagccagcaccaacttgccagccatatgagcaagccaccttggaagtggataccccaacccactacactttcagaggactgcaacctcttgaaagattctgaacaagaaccacccagcttatcaatcctgaattcctgactcacagaaactgggataatacatacatacatactactgtttaagctgaagttttggtgtttttacctagcgataggcctctaatgtggtagatgaatattttgtatgatgttttgtcattgaaacggctctcgattttcaagtcattcctttagaatctggctagtttctctgaagctctatgcttaccattcttgtacttattctggtgtatacaaccagaaagttggcttctctctaggggtaaataaccggagagtgataaagaacttagttctcactataataaccacagagaaaggatgcctcttgttaggttcattttacttttttttttttttttgagacgagtcttgctctgtcacccaggctggagtgcagtggcgtgaccttggctcactgcaagctctgcctcccaggttcatgccattctcctgcctcagcctcccgagtagctgggactacaggtgcctgccaccatgcctggctaattttttgtatttttagtagagatgggatttcaccgtgttagccaggatggtctcgacctcctgacctcgtgatctgcccacctcggcctcccaacgtgctgggattacaggcgtgagccaccgcgcctggcctcattttttttgaaaaaaaataaaaaataaaaaataaaaaaatctaagcttaatcatagatttaccttactctgctccaaggcaatttttcaactttttaaaaaataaatgttttctttcagtataatacccaaaaaagtgcacaaaatgtcttgataacatattacaaagggaacacacccatgtaacccccacccagatcaaagaaacagaatatcattagccatctagaagcccatttggtcatcttcattttctttttttttttttttttgaggcagagtcccactctgttgcccaggctggagtgcagtggtgcaatctcagctcactgcaacctctgcatcccaggttcaagcagttcttctgcctcagcttctggagtaagtgggattacaggcacgcaccactacgcccagctaagttttgtatttttagtagagacagggtttcaccatgttgggccaggctggtctgaaactcctgacctccagtgatccgcccgcctcagcctcccaaagtgcttggattacaggcatgagccactgtgcctggcctaattttttttattttttattttttgtagaagtggtctcgaacttgtggtgtgccttcttatttatttattcatttttttttagagacggagtctcactgtctcccaggctggagtgcagtggcacgatctcggctcactgcaacctccgcctaccggattcaagtgactctcctgcctcagcctcccaagtagctgggattacaggtgcccaccaccacgcccaactaatttttgtgtttgttttttttagtagagacggggtttccctgtgttggccaggctggtctcggactcctgaccttgtgattcgcacgcctcggcctcccaaagtgctgggattacaggagttgagccactgcgcccggccgctttcttttggttatcataaggcgggcagtagctgaacttctcaggagtccaagctctgtcattctttaggctttgtgcttctggataagttacctcatcatccaaatgttactgcaaggactaagtgagatgtagaggcagtgggcaaattgtgtaaaaatactactgtttcaagtgttttgatgttggagttcatcttgccagccaagggatgatgatactttgattcttcaggatgatcagagctcagacttggacggaagctccctcaggtcaaggaggaccacattttttggggggtggagagaggaggcagaaagagaggcaatgtcaggcactgagatttagaagagtagctatagctgtttttggttcttgtagatccgtctgtgttggcttcctacaggagctagaattttcagagctagtcctacagtgaggggagctaacgtggagtgggcgtgagaattctattcagcaagcacaagcgaagctcaacctttttgttcagcctgctacaaccaatcattatgggagaggggaataaggatcactgcccaaggggcattaggatcactgcccagtgggcattacagtctccccagggaggcactcttttttattttttattttttttgagacggagtttcgctcttgttgcacaatgttgggtcactgcagcctccgccacccgggttcaagcaattttcctgcctcagcttcccaagtagctgggattataggcatgggccaccacgccccgctaatacggaggcacttttaattagcccacagtccagtgaaatttgacggagtgaggaagtgacctcagagtacagaacgggatgggatccttccgggcttgggcagcctttggtagtggggatgcttggaagggtcagggtctcagtcctggaggtgaccaatttttctctccaaaagagaaaggaagatgattaaaaaaaaaatccatgctccaaagcggcagccaaatccttctatggcccccaatgcatcacccagaaaggggctccagactctcctgcaaaaggccaactctacttcccggctcccacttcccctccttcgccacaggagggtggcgaaggatttataacccacctctttctttcagttgccatggagacaagccccagtcctttcattccttctggtacctctctctccaacgcaggcggaaaggaggcggcttagcccaaacatgctgggggaggggctggcggcctcgacggcagctgcggaactaggccgagggacaaaggctaaggtcagccgcggttcaagccctttcgtctgccgacgaccagcggccagacgctgcgggagcactgctgggctggaggagggctcgagctgcgaggacggcacggagcagcggggtgggactcggggtcgccccaggagagttccgcggcccgggggggcagaggcatgcacaagtggggggcggaaggagggggtggatgaggaggctcgggcccttccacccacgcgtccattgggcggcgccgccatcactctcttctgggctacaccgccttctcttcctccgcggaacccggatcccctcctccaccaccctctccccgccccgtcacgatagcctctcattggacggaggcacggtcaatcctcctcgagttagggagccgactggacgcgaggcctttgggccgtccccagcctcgtcggattggcttcctgcgcgttggcgcaacggaagaggcggccggccgagggcgcgcctctgctctggctggactgccgcggaggaggcgagaaggaatccgacgctggggggcttgctcgggcggcagcgactgctgctgcggatgggagggggccggctcggcgcgcccatggagcgccacggcagggcttccgccacctccgtctcgtcggctggggagcaggcggccggggaccccgaagggcggcggcaggagccactgcggcgccgggcgagcagcgcgtcggtgcccgcggtcggggcctcggctgagggcacgaggcgggatcgactgggctcttacagcggccccacctcggtctcccgccagcgcgtcgaaagcctgaggaaaaagcggccgcgtaagtgttccgtggggcgccctcccggcccgccctgcccccccttccggcccaccctgtccccttccggccccgccgccgtttttcccgcgcgcggacactgtccccgcacggtggtccctcgttggtgcgtggcctgacatccggctggaggcctcgggtgctccgaaagcggtaccttcgggggcccccccgcacccattggtatgcacttcccgcttgttggagtggagggcttttccccaggacctgtcctcccttttcttagctccttgggcattctcttcctgagggtcacatgattttatcctcgagaaggcttcttttgactcatttccacctcctttcctcccaaatcctttgaatccccaatgtttgttttccgtgggtttccaaagagctgctctctaatactttaagtcccttttattcgtcaatttcgggcttactggaaaatggtgaactgccccttgagttgcaccaggcctgaaactgtattccgtgcacctctaaggtggctgcccttcttctcgtgagaatccaggtcatctctcacccacatatcccctccgttttccttctgtctatttgcaggtactcacgattcagaactgtggcattctgggcattaaggctctttgttttgaggggaaacaacatctttctgaattttgccttgggagttgcatacgctcctcccagagaatccgtttccccattttattaggtttctttttctgtgttgtgtattttctcccctttacaagtcttcaattcaggaccgctgcctggcagccattgctgctgttgaaagtatcaattgtcctgatactgtaatatgagctttacagtgtgatgccattttacatatggttggactttttggtgggtgttgccagattcctatttcaggaaattgacttgtttaaatgcagattgtgagagggagggaaaatggcaagatgtgagatttttattgaatagtcttctaccttagcccagtcacccaactgcttttttgaatcttctctgatatggatgattaaatgtagttctattttgctgtgaaaagtttgggagttttcagttcttttgtctttttccatcttcttgcaacagatttggaaaacagattcttaacctgtgccattttcagagtcagtcacctagttttgttttatttgagaagcacctgagtttgaagcaatgcaaaatatgagatccttcatggttttgtattacatcgttggaaatggatgtaaattccaaagattcagcaaataagagtatagccattagccacaagggtttttttggtttgttttttgttttttactttgagacagcgtcttgttctgttgcccaggctgaagtgcagtggcatgatcatggctcattgtggccttaacctcctgggctcaagccatcctcctgcttcaacctcctgcattgctgggactaaaggcacgtgccactatgccaggctaatttttcaatttttatttttttaaatagagatgggatctcttatgttgcccaggctggtcttgaattcctcctggtctcaagcgatcttcccacttcggcctcccaaagtgctgggatatagacgggagccattgtgcccgacctggcagtcgtctactaagagctttggtaactcattagcctcgtggctctgaggtaggtggtagtattccattttacagatgagaaaactgggacacgtttgcccggtcaaatggctagtgcgttgtgaaatagaaatgtaaactcagaattgctagcttcatagcttttgcggtggaccactgtgtttttctgaattatttacgttctgttagttatttcttcattgctctaagaccaagcataagtttgatcttttgtgttcaagactgacttacttgaggcgaaaatttttagatactgtggaagtacttccaaatattgagcatgagaatgacctggtaaaagtgcagattcagtgggcccagttaagctcctcatattcaaatacaggtgactcaaagaccacactcagaaaaaccggtttacactgggtggggagaattatattaaggtagttttgaaacttattttagggaactaagtagacacatattcatgctataggatttatattttgttttgatgtttgatgtttgtcgtgattcccttcattatcttctctggctgataaatcatgaaaacccatctttccagtataagacctgctaaaggaatgaacaggatactgattgttcttccttccatttgtttcttctgtactatctaggggtgcccctgttaggtggagaagcaggctgggcgcagtggctcatgcctgtaatcccagcactttgggaggccaaggcgggtggatcacctgaggtcaggagttcgagaccagagaccagcctggccagcatgttgaaaccccgtctctactaaaaaatacaaaaattagctgggcgtggtggtgcatgcctgtaatcccagctactcaggaggctgaggtgggagaaacatttgaacctgggaggtggaggttgcagtgagccgaaattgtgccagtgcactgcagcctgtatgatacagtgagactcctcaaaaaaaaaacaaaaaaaaaggagaagcagcttgttgactgccgaaccctcctagagtatacttcagtcttatctctgagagaattcaactaagactaaatcttttttatttattgttgggaggtttgggtatggaatggtgccacctttctggtgaaaccctatctctactaaaaatacaaaaaaattagccgggtgtggtgacgcgtgcccgtagtcgcagctactcgggaggctgaggcagataattgcttgaacccgggaggcagaggttgcagtgatcgaagatcgcgccactgcactccagcctgggcgacagagcgactctgtctcaaaaaaaaaaaaaaaaaagccttactctgataccgcactacttgtctaaaggtgcagatagatactagttgtcatttgaaagtcgaaggagctattcaggttatcttaggcattcttgtggtcctggttgtagtcgtgttctgtcacgcgtttcctagagcagtgtagttcccaaaccggcccttgtcccagacttactgcatcagaatccctagcgatgaggctaggcatgtgtatatttaagttcttcaaaagttttgcatcaggtggggaggggggtatgtctcgcagggctgaaagaaataccaaataaagattgattttaaaatgatggaaaccaagacgctaatgatggtaatgtagctaccattttctgagtgcttatttgtcttggacactatgccgagtattttataagcatcttggttaagtctcatagctatcctgtgaggtaggtgttttttatccccaatttccagatgagaaaacaggctcagtgaaattgtccttttgtccaaggccatatagtgagttagtgatggagttgggttttgattcctggtgtcttgacttcagatccagtgttcttggtccacattttggggtgggggaaggtatgtgtgatgtaatccagagctgtggttctcaagtttttaaaactttccctcaacctaccattgcatgatataggtctgcaaaggggtctaaaattatattttaaattttattgaggcataattaaatagagtaaaatgtacaattttggcaaatgtagacactcatgtaacaagagaacatacatttttatcaagggctccaggtgttgagcatatgtgcagcaggtgtgcagaaggtgtggaagccctgtgatcagagtgctccacagtagtgtggacaacaaacttatcctttgaagatgactcgcaaggcatgttgtagcatgccagggagacctttggggcttgttgattttggactcctacaaatctaaccttcataatacagtttttgtttgtagcttgacaacactagcctagaaaatggatcattttttcttggctttccgaggagcgttgctgttggcagtatggaactggagccggggccctgttaggctgcctttattaggctcagcatttcagcttcagggaattaggacggattgacccctgggagctgaggaaaaatgttagattgctatagctttgtggcccattgggagaggcaagatgggagttttttttttgtttgttttttgtttttttttttttttttttagaggagtttcactcttgttgcccaggccagagtgcagtggtgcaatcttggctcactgcaacctctgcttcctgggttcaagcaattctcctgcctcagactcgcaagtagctgggattacaggcatgtaccaccatggccaactaattttttgtgtttagtagagatgggatttcaccatgttggtcaggctggtcttgagctcctgacctcaggtgatccatttgcctcagcctcccaaagtgctgggattacaggtgtgagccaccgtgcctgaccgaaaagatgttgtttgtttgtttgtttttgagacagtttcactcttgttgcccaggctggagtgcaatggcgtgatctcggctcaccacaacctccacctcccaggttcaagtgattctcctgccttagcctcccgaatagctgggattacaggcatgcgctaccacgcctggctaattttgtatttttagtagagacaaggtttctccatgttggtcaggctggtcttgagctctggacctccggtgatctgcccacctcagcctcccaaagtgctgggattacaggtgtgagccaccgcacctggcctgaaggtgttttttaacctattgatttatcaactttttatttatttatttatttattgagacgaagtcttactctgtcgcccaggctggagtgcagtggcaggattttggctcactgcaacctctgtctcccaggttcaagtgattctcctgcctcagcctcctgagtagctgggactacaggtgtgtgccaccgtgcctggccagtttatcaactttaagtggaaccaaagtaaatacagcctgtcttcttagatatataataaatactaagcaataagcagggactaaaaatcgtccccttatgcagctgtgtaaaatggtacagtatattactttaggggccatgtgtaagaatcatgcagttggataatatggttgtttagtgttggtgtccctgccttctatctggggagaccatagcaggaagagatgtatgttgttaaaaatattttgctgactgtgtatgctggctcatttctgtaatcctagcactgtaggaggctgaggtgggaagatcacttgagaccacgagttcaagaccagcttgggcaacatagccagacctcgtctctccaaaaataaaaagggcatgcatggtggctcacacctgtaatcccagctactcaggacgctgaggcaggagaatcactcgaacccaggaggtggaagttgcagtgagccgagattgcgccactgcactccagcctgggagacagggcgagactccatctcaaataaaataaataaataaataaataaataataataaacaaattagcagaatgtcgtggcacatggtcgtagtcccagctacttgggaggctgagacaggaggattgcttgagcccggaggattgcttgagcccggaagattgaggttgcactgagctatgatcatgccactgcactcgagcctgggcgacagagggagaccctgtctccgtttttttttttttctttttttttttctcaaaacatttcaaaaaataggaggaggaagatagactaggctattgtagagcatcaggcaatgaaaagaatggctattttgattatttaaaagagcggtgatgttttttggacttaaagtttgtagccttgtgagcttttctcaggttcataatttggggtatcttcaggcactgttcaggtaagactgactgggatgtgaaaacttttctaaattgcggcttaaagtttgctttctaaaaatgaaacccatctcagttttttagtagttcgttacattttgtgtgtttatatttcctgaatgtagaatttgttgttgaatttgctgattttacggtatgtggtcttttataagtatctagtccctgagtttaaaactattttgggaataagaataattattaaagtacctctttcaatgttaggccaagatattgctttcctagaacagcctagacatggatttgcgatgtcattaaccatctgtggtctggtaaaagtgtagttcataatattggaaaattgagcacacttttaaaagtaaactgtgtgtttctttttttttttttgagacggagtcttgctctgtcgcccaggctggagtgcagtggtgcgatcttggctcactgcaagctccttctcctgggttcatgccctttctcttggctcagcctcctgagtagctgggactacaggtgcccgccaccacgcctggctaattttttttttttttttttttttgtatttttagtagagacggggtttcaccatgttagccaggatggtctctatctcctgacctcgtgatccgcctgccttggcctcccgaagtgctgggattacaagcgtgagccaccatgcccagcctactgaactatgtatttcccattggaaagtgtgatgttgtgaaatatatatattggtcttttgcccatttcctggcatacaactcctgaaatccttagaaactccacagtgatgtccttttgtgtgctaaggagttaactgatggctggaagcctctggacttagtcatggaaagaacaagacaggattagagggttgggactttcactcctctccagcctctggggaggggtgggggcttgaaggttaagttgatcaccagtggacagtgatttaatcaattatacctactaatgaagcctccattaaaaacccaggaggacagggtttggagagcttctggatggccaaacaagaggttccaggagggtgcagtgcccgagagcacagaagttccgtgtccctcccctatactgtgtactatgcgtctcttcctctgaatcttttgaaatatctttataataaaccagtaaatgtgtttcttaggttctgtgatccagtctagcaaattaatccaaaccaaagaggggtcatgcaaactccaacttgaagccagttgatcagaagttctggaggcccagattggcaactggtgtctggcagaggtgtggtggaggagcagtcttgagggacttagccctcgacctgtggcatatgatgctatctccaggtacatagtcgttggaattgcattggagggcacccagctggtgagtgctgcagaattggttacttgctttgtgtgtgggctcacagaagtcttctgtgttgatcgttgctgtggtgtgagagcagaggaaaaactttgtttttccacactcttaaaggatttcagtcgttgagacctattatgggaccttgtgctttgcatacgttttgaaatgtggcctaagtcaagtataggttgtctagactgagtaccttggaggtcttaatatcaggaaatatgttaagggctgtgaatagactgaaatatctgaaaattaatggccaggactcactaactagaaggcaggggccttctcttatcagtgagctctaggctggatgtgttagctcacgtctgtaatctcagtactttgggaggctgaggcgggtggatcgcttgagcttaggagtttgagaccagtccgggcaacatggtgaaacctcgtctctacaaaaaattagctggttgtggtggcctgcacctgtagtccagctacttgggaggctgaggtgggaggatcacttgagccagggaggttgaggctgcagtgagcctgaacctggtgattgtaccactgtactctagcctggatgacagagtgagactgtgtctctcaaaaaaacaaaaacgaaaacaaaacctgggtgcagtggctcacgcctataatcctagcactttgggaggccgaggtgggcgaattagttgaggttacgagttcaagaccagcttggtcaacatggtgaaactgtctctactaaaaatatgaaaactagctgggcatggtggtacgagcctgtaatcccagctactcgggaggctgaggcaggagaatcgcttgaacaactgggaggcggaggttgcagtgagctgaggtctgtcgctgcactccatctgagcaacagagcgagactccatctcaaaaaaaaaaacctcttggttttaattggttatattggattttgttttttggaatctgttgagataatcatgatttttttcccttcatcttactaattggaatttctaatgtaaaagccattgctgcattactgagaagaatctcttttggctatggcctattaattttactgtacaactagattccattttttattttattatttatttattttgagatggagtctttctgtcacccaggctagagtgcagtggcacgatcttggctaactgcagtctctgcctcccgggttcaagcaattctcctgcctcagcctcctgattatctgggattacaggcgcccaccaccatgcctgactaatttttgtatttttagtagagatggggttttaccatgtcggccagactggtctcgaactcctgacctcaggtcatccactcgcctcggcctcccaaaatgctgggattataggcatgagctgcctcgcccttaggctttcttgctgagtatatttaataaatatgtaaggctagatgtttccgtttaagtactactttgggtatatcctattggtttctatatattgtattctcactgtcattcatttaaaaataaattttgttttgatttcctttttaatcccagagttaatagtttaaaaatttcaaagtagatagatttatttctttgtttgttggattaatttctaattttgaagttttgcagtaagtgaatgtgacttgttctttggaatttgaagttctttaagctagtgcagttaatttttgtgagtgctttatgggtttttaaaggaatgtttgcatggttttgtttgttttgggaaacagtcttgctggtcttgagtgtttttttttgtttgtttgttttgggaaacagacttgctgttgtctaggctggagtgcagtggtgcgacctcggctcactgcaccctctgcctcccgggttcaagtgattctcctgccttagcctcccgagtagctggaattacaggtgcccaccactgcacctggctaattttttatatttttagtagagacggggtttcaccatcttggccaggctggtctcaaactcctgaccccgtgatccacctgcctcggcctcccaaagtgctgggattacaggcgtgagccaccgtgcccagccgggtttttttttttttgagatggagtctcgctctgtcatccaggctggagtgcagtgatgtagtgtaggctcactgcaacctccacctcctgggttcaagtgattctgctacctcaggctcccaagtagctgggattacaggcatgtgccaccatgcccggctaattttttgtatttattggagacggggcttcaccatgttagtcaggctggtctcgaactcctaacctctggtggtccacccatcttggcctcccagagtgctgggattacagatgtgagccattacatccggctgttttttttttttttccccagagttctatttgtgtttactagatccaccttattagccatgatattaaaattctctttctaccataattttgtaggtgtgtgtgcaatctacaaattcctgaggtctgtgtcattctcatactgacttgtagatgtgtcagtttctctgttagtgttttcgaagtatgtgttatgtgcataaggaacatggctattacattcatcagttgtacttttttttttttttttttttttgagatggagtctcgctctgttgcccaggctggaatgcagtgctgcgatcttggctcactgcaagctccgcctcccggcttcacaccattctcctgcctcagcctcccaagtagctgggaccacaggcacctgccaccatgcccggctaatgttttgtatttttagtagagacggggtttcaccattcacaggatggtctcgatctcctgacctcgtgatccgcctgcctcggcctcccaatgtgctgggattacaggcgtgagccactgtgcctggcccatcagttgtactttttatgcacatgagagagttttttttttgtcccttcttaatgcttttttgtttgtgttgtttggtctgctagtattgtatctgcttgctgttaacatttgcttgatacagtggagtagcattctccaggcatttattttagtcatttaaattcaagtgtataaattcagcaagtgagttaagtgaatggtgccagcgattctacccagtgtttccgtcagtaactatatgattatgagtgagtatagggatgagaatggtgactctcctttcccctgtagggaaaggaaggggcgtgattgtctggaggggcacctcttgtaatgtgagcatagctctttgccaaatgaaacactggtcttgaaacaaggtatgacctttactgtactatggctcttaaatgtaaatcagctgctctatctagtattcatctctagtgaggtgcttaagagtgcttaacatttttataatgtgtaatacttttgactaaatgccattttcatctttcaaagcattcaactcctcctcatggtgtgactccattgtgggtgatttaccatttttccttcagtttacttgtataatcttgtttgaggtatctttttacatcaacatatacttgaatttctccttttctctcctaattcctggttaagctcacagaatttcctcttcagtctagaagagaaatttgacctatttgtgattactgataagtgcagtcattcccatcatttatttatttattaaattatttttaagttttttttgagatgaagtcttgctctgtcgcctaggctggaatgcagtggtgcgatcttggctcactgcaacctctgcctcctgggttcaagcgattctcctgtctcagcctaccgagtagctggggttacaggtgtgcaccaccacacctggctaatttttctatttttagtagagatgggggtttcacgatgttggccaggctggtctcgaactcatgacctcaagtgatccacctgccttggcctcccagagtgctgggattacaggctttattatttatttatttatttatttaagaggtaggatcttgctctgctgccaggctggagtacagtggctgtatcacagctcactagcctcaaactcttgggctcaagcgatcttcctgcctcagcccctggagtagctgggactacaggtgcacgtgatcatacctaaatttttttttagagatgtggtcttgctgtgttgtccaggctggtctcccaactcctggcctcaagtgatccacccaccttggcctctcaaagtgttggaattacaggcatgagccaccacacctggctgttttgtatttactgtacttttccccatttcttgtcaatcagcttttttgaactgattgctttattttttttctaatgtgaaagtcattttttttttctcctctggagttacctctaaattttgacacatttaaactatcacttctatattcttgtgtagaattaatcagaatctatcttttcttcccttttccaacaagacagaactgctgcttgctttcatttccttctcccttctcttccctcttcaacttcctatgtcgaaatcatgtaagtattttagtttcagattgcttatttttgtaaaagtcagtacttttgtttatttcttaaagctcttggattaaaaaaaagtttcttaaagctcttggatgttttaaaattatggcattcatctaccaattatgttagagaaggtctttgaaaagtaaagttgatcccttacatatgtgaaaattgtttttgcactcccgcttgaaagcttatttggttggctggatataagtttcaaaatcattttccttataactttgaagccagtgctccgttgtcttctggcatctgtgctgctgatgaaaagtctgatactgacttttatgtgatttatgtatctttataggaattcagttttttccttatgatatcttgaaatttcaataggatgtgtctaagttgtcttccccttctctgctgaccgataaacactgttcagcccttagagtaacctgatgattggtgtcttccctttccccaaggaaatttctggaactaacataagatgttggtccttctggttctatattctctccctctctcttttttttttttttttagttagagacagagtctcagtctgttacccaggctggagtgcggtggcatggtcatagcttgctacgaccttgacctcctgggctcaagctatcctctcacttcagcctctcaagtagctgtgactacaggtgtgcgcctggctaattttttatttattttttatttttgagacggaatctcactctgtggccagactgtagtacagtgggacaatcttggctcactgcgacttccacctcccaggttcaagcgatttccagccaatttttgtatttttagtagaggtggggtttcatcatgttggcctggctggtctcgaactcctgacctcaagcgatccacccacctcggcctcctaaagtgctaggattacaagcatgagccaccgcacctggcctagttttttttttttcttttaaagtagagatggggtctggctgtgttgtcctggctgatcttggactcctggcttcaagtgatcctcccatctcggcctcccaaaatgctaggattacaggtgtgagtcactgcacccagccaggttccattttctctatattgactatattgacctttctttcatacttgaaaagcatttggggataatcttttaattttgttttctatttgttttttctgtgcccattttgctgttaaatatatctgtcaagttttattttagcaattgttttttctcttttataacagcgtctttaatgttgtaatttacatacaataaactgcatccatttaaaatatacagttccatgagtttcgacagatgtgtatagacacacacacacacacacacacacacacacacacacacacacacaccccttttacccccaaacaagagttgggttaccagagtttttccctcctcctgtgcagtccaaccccagctctcaagcccatgatttgcttgctttcagatgtaaaaatgattagcttgccttttttttttttttccccctttttgagacggagtctccctctgtcgcccaggctggagtacagtggtgcaatcttggctcattgaaatttactcctcctcctgggttcaagtgattctcctgcttcagcctcccgagtagctgggattacaggcatgcactgccacaccgggctaatttttgtatttttagtagaaacgaggttttgccatgttggctagtctggtcttgaattcctgacctcaggtgatccgcccgccttagcctcccaaagtgctggaattacaggcatgagccacgacgcccggcttttttttttcttcttttcctttttttttttttttttgagactgagttttgctcttgttgcccaggctggagtgcaatggcatgatctcggctaactgtaacctctgcctcctggttcaagtgattctcctgcctcagcctcccaagtagctgggatttcagcgcgttccaccacgcccagctaattttttttttttttgagatggagtctcactccgttgcccaggctggagtgcagtggtgtgatctcggctcactgcagcctccatctcctgggatcaagcgattctgctgcctcagctttcttagtagctgggattagaggcatgtgccaccacgcccggctaattttttttatttttagtagagacgtggtttcaccatattggtcaggctgatctcgaactcctgaccttgtgatccggccgcttcagcctcccaaagtgttgggattacaggcgtgagccactgcgcccagcctaatattttgtatttttagtacatatgtttagtacatacgtacatactttagtacaatatgatttcaccatattggtcaggctgctcttgaactcctgacctcaggtgatctgcctgccttggcctcccaaagtgctgggattacattcttgagccactgtgcccggccagtttgcattttcaaaagtttcatataaatggaataatatagtatgtagccttttgtgcaaggtttcttttactcaccctatttttgagattcatgaatattaaatatgtagtagtttgtcccttttttttggttttcagagcattctttcccacaattaggaaattaacatggacaaactgtatttaaattttgccaattttggctgggcatgatgactcaggcctgtaatcccagcactttgggaggccaaagtgggaggattgctggaggccaggagttggagaccagcctggacaacacagtgagaccttgtctctccaaaatagctggcatggttgtgttcctgtagtcgtagttacttgggatgatgaggcaggaggattgcttgagcccaggagttcaaggttacagtcagttgtgattgagttgtgattgcactccagcctgggaaacagagcaacacgctgtctctaaaaataaaaataaaaggtgaaaaataaatagaaacagttttgcatggattcttttgtacgttgtttatttagttgtatataattttatcgtgttaatttttgcagccacacacatctggcaatcgttttttaatttttgatttttctctatggtagctttttttatggatgagttatgattttacctctgagaatatttttgattctgtttattcctgcaactctttcttcagatatttagtttctcatttttgtagtgtttatttcccttgtagtttttctagtttgtaaaagtgataatctctggtttgagaattcctgttcttctgccagtggattcagtgtctgtttaccagttggtcaggattgattttaggggaggtatgagatacgtggcaaaatatggggtaaaatgtctccttatttcttctgggtaatagcagccacctgagtgccatcctgattctggggctccagtgcctgtttccagtgaagactttgcttctgtcagtgttggggatagaacatggttattggtagagggagtggcctgtccacttgtgccaaacacatttccccaccatcgcttgtgactgcaccactgcaccagacctgcttttgtttccccatggtagccgccctgaacctacggcttggatagaatacccctacgttctctctctcaccttcatagctgatcccagttttaatagcattcctcttttgaggcttatgcatggttattgcctctgtaaacctagttctgctgctgctatctcttttttttttttttttttgagacggagtctcgctctgtcacctaggctggagtgcagtggcatgatctccgctcactgctccgcctcccgggttcatgccattctcctgcctcagcctgctgagtagctgggactacaggcgcccgccaccacgcccggctaatttttttgtatttttagtagagatggggtttcaccttgttagccaggatggtctcgatctcctgacctcatgatcctcccgcctcggcctcccaaagtgctgggattacaggcgtgagccaccacacccggcctgctatctcttcttgtttcccagaattattttagaaaataatatatcaaatatatcaataaacccacacccttttttttttttttttgaggtggagttttgctctgtcacccaggctgtagtgcagtagtgctgtcttggctcactgaaacctccacctcccgggttcaagcaattctcctgcctcagcctcctgagtagctatgattacaggtgcccgccaccacgcccggctaattttgtatttttagtagagatgggggtttcaccatgttggccaggctggtcttgaactcctgacctcaggtgatctgccctcctcatcctcccaaagtgctgggattacaggtgtgagccaccgtgcccggcctaaacccacatctttagtaatttctacgatttagattgggaggggaagcatgtacagatgctttttgacttacgatgtttatgctacattccataaacccatcagaagttcaaaatactgtaaatcaggctgggcgcagtggttcacacttgtaatcccagcactttgggaggctgacctgggtggactgcttgagcccaggagttcaagaccagcctggcaacatggggaaaccctgtttctacaaaaaatacaaaaattaggtgggtgtggtggcatgcacctttagtcccagctgctcaggaggctgagataggaggattacttgagcccaggaggcagaggttgcagtgagctgagattgtggcgttgcattctagcctgggtgacagtgagaccttacctcaaaaaagagaaaaagaaaatactgtaagtcaaaatgcatttaatatacccagcctattgaacatcatagcttagccaaacctaccttaaatgtgcttagaacccttatattagcctacagttgggcaaaatcttctagcataaagctagatgatttaataatgaataatataaaagataattattttacaataaaatgtcgaatatcttgtaatttattgaatactgtactaaaaataaaaaaaacaataaatacttgaagtagagtttctactgaatgcttattgcaccattgtaaatttgaaaaatcattactttgagccctcattaaattgggaccttccatatgtctgtgcagtccactttgatccaatctcttcaggccttttttttctttgagacggagtgtcactctgtcgccaggctagagtgcagtggtgcgatcttggctcactgcagcttctgcctcatgggttcaagcgattctcctgcctcagcctccggagtagctgggactacaagcgcacgccaccacagccagctgatttctgtatttttagtagagatagtttcaccatgttggccaggatgatcttggtctcttgaccttgtgattcacctgccttagcctccccaagtgttgggattacaggcgtgagccaccgtgcccagccctgccttttttttttttttttttttttgagacagagcctcactctgtcgcccaggctggagtgcagtggtgtgatctcagctcactgcagtctccacctcccaggttgaagcagttctggtttagatttcctgagtagctggtactacaggtgcacgtcaccatgcctggctaatttttgttttagtagagatggggttttaccatattggtcaggctggtctcaaacttctgacctcaggtgatccacccaccttggcctcccaaagtgttgaaattacaggtgtgagccactgcgcttggcctaaaggacattttgggaaccggtgttaatgtctattgaaaccttttatttttggaatatcagattttgaaagataaattgaccattggaggttatatgttacataggtttgggaatttcctgtttctagtttgctgctaaaccagaactctgaagtctcaatgtttttttttaagccgataggaaagagagattttcattctgaatctttgtttttcacagttgaggcttacgagtagtcatcttgttatttttaaaacacttcatagtgcggtttgcgcttgtctgacagaatggttgggttggctcaatactttgatatttttctttttcgtctttgccgtagtattttttttttaagttatgcatctaaatcaagacagaatcacatttctttgccccaaaacccttttgcctagaattatgttctttggaaaccctagcgtttgaaataagttgctactgtggtaagggtaaatttaattttcagaaaaaagctgttctgacttatttttcttccccatttagtttttccatggtttggactggatatcggtggaactctggtcaagctggtatattttgaacccaaagacatcactgctgaagaagaagaggaagaagtggaaagtcttaaaagcattcggaagtacctgacctccaatgtggcttatgggtctacaggcattcgggacgtgcacctcgagctgaaggacctgactctgtgtggacgcaaaggcaatctgcactttatacgctttcccactcatgacatgcctgcttttattcaaatgggcagagataaaaacttctcgagtctccacactgtcttttgtgccactggaggtggagcgtacaaatttgagcaggattttctcacagtatgcattttttagcttatatacaatttatggtaatttgattgttaaaaataatgccagtagcaagtggtgaaataatttccatctctaatggaacttgaattttcttgagtcaaatgaagattaaaggtacgctagtgataggagttggccatctagaggtggttgtctagttcagatgtatggacgacaatcagaaccactaaaagggtagcattttattgctcctttagtatgaaaaattagggcatctgctatacgttgaggaagaaactacctaaaaggaacatcattagatcatgaacaatgagattgaaatataattaaaatcatttcatgtcataaaattgttttcagtcttgtctaccacataatttctcttgtctccctcagttgtttgctggcatgttcactaactgaaaaaaataaggaactctggtcaaaagtggtgttttcaggctcagggctggtctgagatgggtgactgcagagccctcctctcccagaatgctttctgatgtgttctgtgctgcacacttaactggagtctcgccaccatgtctggcccctggggaatgctgccaggcgctctatcttgctttcattgagtgaacactggagaacattgtgagcaagaccttgaggctaggtcctttcagggtggatggtgggggtaggccggagaactgacaaatgaataagccaagatcctgaccgtcagggtgcaatacagattgaaaatgtcttcagtgactgactgtttttctgttgctaaatgagagaatattagtctgaaagagattctgcctttttgttttgttttgttttcttgagatggagttttgttcttgttcccaggctggaatgcaatggctcaacacaacctccacctctcgggttcaagcgattctcctgcttcagcctcccaagtagctgggattacaggcatgtgccaccacgcccggctaattttgtatttttagtagagacagggtttctccatgttggtcaggctggtctcgaactcctgatctcaggtgatctgcctgcttcagcctcccaaagtgctgggattacaggggtgagtcaccttgcccggcccagattctgcctgttattctgcatgtcttttagtagagatggggtttcaccatgttgtccaggctggtctggaacacctgacctcaagtgatctgcctgcctcggcctcccaaagtgttggaattacaggtgtgagccaccgttcctggcctcaactttttgactaacatgccttggagttcttcccacttcagaacataaagatcctcttcatttttgttttgttttgagacggagtctcgccctgtcacctaggttggagtgcagtggtgccatctcagctcactgcaacctctgcctcctgggttcaagagattctcctgcctcagcctcccgagtagctgggtttacaggcgtgcaccaccatacccagctaatttttttttttatctttagtagagactgggtttcaccatgttggccaggctgatcttgaactcctgaccttgtgatccacctgtctcagcctcccaaagtgctgggattataggcgtgagccaccgtgcccggccgatcctcttcatttttagttgctatacagtgctccataatacgaataataatttagtcattcctttattatttaaatggaattaattgattatgaaacagttcaaattttgactgctaaaattcccctccctcccaagaggctgtagctagtttagatagtgaaaaaaatcttaccttctaactggatactttcagccttttggcttcagtttgttaaataatgtgtggcctcttttgatactgctccaaagccttgagatggtcctctgtcacagtccttgtggctcccaccctgtgtcacaaggtggtttctgatagtgctgtggcctgagcttggtatcagccccattgtccctgtaagcagagatctgaatttctgtttgaaggttgataaatgctgtggttttttttttttgttttttttgttttttttttggtcacacttattcagctgctgcagtagtttctatgtagagtgtatttgggtctgtagtagcaggagtctgtctcagcactgtgtccctaggtttgctcctaaatctgttctgtaaagcatgcacaaataatacacatctgtgagtgcactttcatggttgtttcacgtagtggggatgccttattgaatggaatttttgtttctgttggcttattaaaaagtctgagtacattcttatttcattacagataggtgatcttcagctttgcaaactggatgaactagattgcttgatcaaaggaattttatacattgactcagtcggattcaatggacggtcacagtgctattactttgaaaaccctgctgattctgaaaagtgtcagaagttaccatttgatttgaaaaatccgtatcctctgcttctggtgaacattggctcaggggttagcatcttagcagtatattccaaagataattacaaacgggtcacaggtactaggtaagttgtatataaaactcactgtttattcttagtatcctaacgggctgagttttcaggtattacatgtaactacaccttcaagaacctgttaggtgaaagtgtttctggattatgcaaacaaatgtttctctttgaaaattctgattttatgacctagttttctttaatctctactgttcaagatttattatcctaggtgtttcttaaaagatcacatcagcagactcattgtagcctttgccctcagatagtttatggtgtgcatacacaaagtagctaaagttattaggcagcatctgtaaggagaaggcacgggaaaggacctagctctgaaacctgtgtaaatttcatgcttccacacacatgtgtgtgtagaataatgatgtattctatgtatgtgatttagaagttgatatgtactgatcagtagaaaaattattgagggaaggtagtatgaaaagagaggattagccgggcgtggtggctcatgcctgtaatcccagcactttgggaggctggggcgggtggatcatgaggtcaggagttcaagaccagcctggccaacatggtgaaaccccatctctactaaaaatacaaaaattagccgggcgcagtggcaggcgcctgtgaatcccagctactcgggaggctgaggtgggagaattgcttgaattcagagggtggaggttgcagtaagccgagattatgccactgcactccagcctgggtgacagagtgagactccgtctcaaaaaaaaaagaaaagagagtattagggccaggcacggcagcttatgcctgtaatcccagcactttgggaggccgaggcgggtggatcaccagaggtcgggagttcgagaccagcctggccaacatggagaaaccccatctctactaaaaatacaaaattagccgggcgtggtggcacatgcctgtaatcccatatacttgggaggctgaggcagaaaaatcacttgaaccaggaggcaaaggttgcggtgagccgagatcgtgccattgtactctagcctgggcaaaaagagctaaactccatctcaaaaaaaaaaaatgaggattagatggaagaagagaatgtttcggcttaagggtcagaggtcacttcaggaaaaacaggcatctagggattgggataaacaatttttttaaaaaaacagttgtgatttaaatagaggagtaatttttttgtgacaaaacacgttgcaggaggagtatgtttgggggtgtactgataagccagggtgacaaggtgcttggatgagaatgactcagggaatgtacttggagaagggaaagggaggaggtgttagcatggccccaggcgtgtcaggctaatttgcacctgaggctcttcatacttggcagacagccagactgcactggggacatgggccctgtgttttgtactttgcatgttggctcacatgcatatgtaccttaaaggtgtatatcaggcaccttatcttttcacagacttgtttcctaccagtggcatttgcatgattgggttggatatgtgaatatggttttggggttcataaatgttaacttcttgttcttatttttaaaaatgttataatactgtgttaattgtttttaatcatagtcttggaggaggaactttttttggtctctgctgtcttcttactggctgtaccacttttgaagaagctcttgaaatggcatctcgtggagatagcaccaaagtggataaactagtacgagatatttatggaggggactatgagaggtttggactgccaggctgggctgtggcttcaaggtaagggggcatgtgtgttctaagaaatacaggcgggccgggcgcggtggctcatgcctttaatcccaaaactttgagaggccgagatgggcagatcatgaggtcaggagtttgagaccagcctggccaacatagtgtaaccctgtctctactaaaaatacaaaaattagctaggcatggtggtgcgcgcctgtagacccaggtacttgggaggctgaggcaggagaatcacttgaaccctggaggtggagggtgcggtgagctccagcctaggtaacggagtgagactctgtctcaaaaaaaaaaaaaaaaaaaaaaaagacataaaataataatattgggcatattttttaaaaaagctctattgagatataatttacgtactataaagtcagctgtttgaagcgtacaatttagtggtttctagtatatttacaggattgtgcaaccatcactgtaatcccaattttaggacatttttatcatcctagaaagaaaccttgtgttcattagctacgactctccattccccccacagcccctgccaaacagtaatttattttcaatgtaggtttgcctcttctgaacatttcatataagtggtatcatacagtatatgatcttttgtgattacttcttcatatagcatatgttttcaaacattcacattacagtgtgaatcagtactttattcctttttattgccaaataatatttcttttttctgagacggcgttttactctttttgcccaggctggagtgcaatggcgtgatctcggctcaccacaacccccacctcccaggttcaagcaattctcctgcctcagcctcctgagtagctgggattacaggcatgcgccaccaagcctggctaattttgtattttttagtagggaaaggatttctccatgttggccgggcaggtctcgaactcaggtgatctgccgcctcagcctcccaaagtgctaggattacaggtgtgagccaccgcgcccggctgccacataatatttcattacgtggataatactacattttatccatttattggttgatgaacatttgggttgtttccattttttggttataatgttgaacatttatatgtaagtctttgtatgtatgcacacacacacacacatatatatatatatattttttttttttttttgagacggagtcttggtctgtcgcccaggctggagtgcagtggcgtgatctcggctcactgcaagctctagctcctgggttcatgccattcttctgcttcagccttccaagtagctgggactacaggtgcctgccaccacgcccggctattttttttgtatttttagcagagatggggtttcactatgttggccaggatggtctcgatctgctgacctcatgatccgcccgccttggcctcccaaagtgctgggattacaggcgtgagccactgcgcctggcctgcacatatatttctaattctattgggtatatacctgagagtagaattgctgagtcatatggtcacttaatgtttaatcttttgaggaactgctacactgttttccaaagtggcagtcccattttacaatcttagcagtttatgagcgtttatatttcttgtcaacatttgttattatctgtcttcttggttttagttgtcttaataggagtgaagtgatatcttgtagcgtttttattttttaagaggcagggtctcgccctgttgcccacatgagagtgcagtgttgcgatcataactggctgcagcctgtgtctcctgggctcaggtgtttctcctgcctcagtctcctgagtcactaggactacagctgtgcactgccttgcctaattttttttttgtagagatagggtcttgctatgttgcctaggctgtcctggcctcaagtgatcctcccaccttggcttcccaacatgttgggattacaggtgtgagccatcactcctggctgaacattttttttgtgtgtgtggcagggtctctctctgttgcccaggctggagtgcagtgacaccatcttatctcactgaaacctctacctcctgggttttagtgattcttctgcttcacctcgcaagtagctgggattacaggcacacctgtaaattatgccaacatgcctggctaatttctgtaattttagtagagatggggtttggccatgttggccaggctggtctcgagctcctgacctcaagtgatccacccaccttggcctcccaaagtgctgggattacaggtgtgagccactgtgcccagcccgaacatcttttcatgtgtttactggccatctgtctgtagtctttggataaatgtctgctgaagtctattgctaagtttttagttggattgtctttttattattgagttctggatacaagtcccttattagatacataattcgcaaatgttttgtcccattttgttagttgtcttttcacttccttgatggtgtcctttgcagcatggaaattttaaattttgatgaagttaatcttatctatcttctgtcacttgtgcttttggtgttatgtgtaagaaatctaagatcatgaagaattgcctaatttaagatcatgaagaattgtttattttcttttaagagttttatagttttagctcatatatatatatgtgtgtgtgtgtatttttttctttttttcttttttgagatggagtcttgctctgtcaccaggctggagtgcagtggtgcgatctcggctcactgcaacctccacctcccgggttcaagcgattctcctgcctcagcctcctgagtagctgggactacagtgcgtgccgccacacccagctaatttttgtatttttagtagagacagggtttcaccatattgtccaggatggtctcgatctcttgacctcgtgatccgcccaccttggcctcccaaagtgctgggattacaggcgtgagccaccacgcccgccagttttagctcttatatttagctcttatatttgatccattttgagtaagtttttgtgtatggtgtgaggtagagctccaagttcatttctttttgcgtgtggatatccagttgtcctagtaccatttgttgaaaagatgattctttccctgttaaattctcttggcccctttgtcaaaaattagttgaccatagatgtttgggtttactcctggactcttaagttatgttccattgatatatatgtctgtttttataccagtaccatactgccttgatactgtagcgttgtattaagttctgaagtaagaaagtgtgagtcatccaacttgttcttttttcgagattattttggctattctgggtaccttgagaatatgaattgtagggttaacttggcaaggtctgtaaataagacaactgggattttaatagagattacattgaatcttttggccatcctaatacaaagtcttctgatccaaaaagatggaatgtcttcccattgatttagatctttgctttctttcagcagtgttttgtagattttattgtacaggtgttaatacttttgttagatatatccgtaagtgttttattctctaatgctattataaatgaaatcattgtctccattttgagatcgtttagaagtacaattgtttttcgtatattggggcacatggcttttactaatagaaaaatcatatgtatacatgcttgtttactaagttttaggcacttggtcaatgctgttgattttctgtttgtaacatttgctcgttggtcatcacttccttttctgattggaaaattattgtagcagttctgctgagcatgtactttgaagtactttatcttctagggaaacctgaaattcttaagcagctcactctgggactcagctgtctgtgctttactctgctctgatagagcagtttaccagatgtgcatgtggccatctgagtggaacagctgtgcagttgagatgaattgctgttagaggtgttgtcctggaactgtctggttgcaggagcaatggtgccttccagtgcatctgatgagattctaactgaatatgtgaatatctggtatccaagctagatttcagtagaaaccgcagggaaagctgtctgctcatttagaatgttggagggctctgtttgaagtttgcatttctctttgaacagatgctccattgcaaaataaaaggtttgaagatttcaacaatgttgccctaaaagctaattttatttcaataaagtaacattcaagttctgttgggctttgttgctgttggtttagcaatgggattttttttcccccatcacagctttggaaacatgatgagcaaggagaagcgagaggctgtcagtaaagaggacctggccagagcgactttgatcaccatcaccaacaacattggctcaatagcaagaatgtgtgcccttaatgaagtaaggggacatggatttctttaattgctctaaggaaaatactgaacttaagtgggccccatcacgtctgttttctcagaacagtgcctaaatgtagtcatttggggtggggtttgttttagcacgaagttaaaactcttcaaatacagattaatcttcttttttttttttttaaactgaagataaacattgctacttgtctagaggtaaaatgacatcttttgaggagaaagtagaggaagagtggaaggtagccagtgttccagatattggggactgttgggggtgatgatggataacgatgctgaatgtagactccacactcactgctgagctctagaggccctagggaggaatccagaggaagtcacggaagctgggagaagactgagcaggccgaggggtgccctccttggctcccccacctcagcagagctgcgtctttgtgctttcagcttctttacagtgctgccttgtagcattcaggtcaagcagcattgtacagggctatgaaagaaccaagaatgggctgcccttgggaaaagaggatctaggatccagttggtgcagcttatggcttgtccctgtgtgtatagttgttaaattattcttttatttttatttttaagaagttattctttagataataataggcatgtagcttaaaaggaaacctcaaaagacacaaaggatttgtctcattttaaattaaaaaaatactgtatcagcatcaagtaattaaacatttgttggaatatcataacttcttttttctttattgtatgttccctttcctgtgcttacgtattttcagaaattttagttggtgtgcataccacaatttgtattttatacttaaatatacatttcatggttgtatatttatttgatcaagttcttttatatcaaataacagagcttggcatttggttgcttgctcataactcggcagtaagcatttttaagcatgaagttattctttggttgaattttattcttgatatggggcttaggagtgagatttctggtctacagaaatgatcatgctcatgaattttgacatttatcgtcatgatgctttgcacaagggctgcaccaatttagatcatctttagcggtgaatgagtggattaattttactacaactactgatggtggtggtggaatttcagttgcttttttttgcgaggttaataggtctaaaattttacttttgtttgatgactagtggtttgaatttttcgctgcctgttatattgcttgtatactttgcctgtttgtgtcactgtccttttggattggagtcatactgtttttttttgtttattttaacttatctgtataaaacattgtattcaaaactagttattgttggtcagatttaatacaaatgtttttcctaatctgttttcttctcctgtgacattatctagcatgctttgcagtgggtccagagttgtctggggatcaagtttaagtagccctggaccaactggactaaatttgatcagcagtcaaattgttgctaagagctatgcacatggtgctgtatttggggtagcttttatgagaaaatagaaattaagatgaaaactaattgcctttttttggtgtgctcagaacattaaccaggtggtatttgttggaaatttcttgagaattaatacgatcgccatgcggcttttggcatatgctttggattattggtccaaggggcagttgaaagcacttttttcggaacacgaggtaagctgacttgttcgttgtggtatattatgtacacagagggcttgtgggtcacactgtcatggaacttgaggtagagggtggaggtgaaatgggctgcagtgtttcttttgttttttgtttttttgagacggagtctcgctctgtcacctaggttggagtgcgtggcacagtcttggggctcactgcagcctccgcctcctgggttcaagcagtcctcccacctcagtctcttaagtagctgggattacaagtgtgcgcccccacaccctgctaatttttgtactttcagtagaaatggggtttcaccatgttggccaagctggtctggtctcaaactcctgaccttaagtgatctgccagcctcagcctcccaaagttccaggattacaggtgtgaaccactgtgcctgaacttttttggtagtttaatttcgtaacatttgaaagctgtttcttccctgatactaatgcaaggtaaattttgggttaatttaattgtaagcttaaggaattttagagaaaaacccttgaacattcccctatatttctgatgccatatttttgtctgaactatcctctatattttttctattgcactgactgtgtcattactctgggttctggttttttcatttttttcagtgccagtttttatatattgttgtaattcttgtgccagttatttaagatgcatgttgtaaaaatgaatagatgagtaaacctctcagactagaaccatactatcataagaacttaagtacaattgtagacaggctggaaatgatgaaatggaaaagaatcaaattgctcaacctcatagcctgtcttggaaagcactcttatttttcctatttggggaaaaagaagcagaggtatggaaaggcgtgtaggggttctttcttcccttcttggttgtggggcagttgaactattctttcaactgttcttggattttagatactgttattatgaacatttttcagaattgtattgcatatttagtttaacagtctatatgaattaaaggaaatcaaagtccagataatagcacagatttgaagtgctagagattactttttcctttaaagttactttaagtttttctttttaaattgctttagttcatagttgaagtccaaagtacacaaatccccatatcaaaaagcttaaaattgaagtcatctaacttagttttaaaattctaacattactgtatttgtaaaccagcaccgaattgccattaagtttcttacagttcatgtttctgtatacatctttttttgtgatctgacttattttattttgctttatattagaattttttaaactcgaatgttagatctttttctgctttatttctgcctcttgtttaaccttttcctaggtagaacatggagattagttttttaagttaaccttaaaaaaaaaataggctgggtgcggtggctcacgtctgtaatcccagcactttgggaggctgagatgggcagatcacctaaggtcaggagaccagcctggccaaccatggtcaatgtggcaaaaccctgtctctactaaaaatacaaaaattagctgggcgcaatggcgggcgcctataatccccagctactcgggaggctgagacaggagaatctcttgaatctgggaggcggaggttgcagtgagctgagatcgcaccactgtactacagcctgggcaacagaacgagactctgtctcaaaaacaaaaacaaacaacaacaacaaaacaaacaaaaacaccaaacaggccaggtgcagcggctcacgcctgtaatcccagcactttgggaggccgaggtgggcggatcatgaggtcaggagttcaagaccagcctgaccaacatggagaagccctgtctctacaaaaaatacaaaaattagctggacgtggtggcacatacctgtaatcccagctacttgggaggctgaggtgggaaaatctcttgaacccgggaggcagaggttgcggtgagccgagatcgcaccactgcactccagcctgggcaacaagagcgaaactccatctcaaaacaaaaaacaaaacaccaaaccgatatcatcataatagttataagccttcgtgaaattcttggttgcattttgtccttattgctcgctgactttgtttttcccactgcttagctttgctggtccatttgtccctgtgttttccatttgcattcaggcctttgactcttgtgtgcatctctgcccttgtggaactttgatgattattttattttatttttttatttaagttctaggatacatgtgcacaacgcgcaggtttgttacatacgtatacatgtgccatgttggtgtgctgcacccattaactcgtcatttacattaagtatatctcctaatgctatccctcccccctccccccaccccatggcaggccctggtgtgggatgttccccttcctgtgtccaagtgttctcattgttcagttcagaactttgattattttagcctctctgagccttgaaatattttcttgccctcacattgaagtcactttaacttttgttgtgaaagcttcgtatagattctctcaagcgtttcctctttgatcctttattctcatcttagcacgttgtagtttataaccacctgtttctgtcttgatagtagcatcctagtcttcagtggaccccccccatatatatatataatggttaactgtatcttctatatttttattataaaataaaaggtacagaaagctgcctaaaacaaactgtatagtgaactattaagacaaacagccttgcctctgtatttcagctgtgccttgtcctgtagctgctggccgcctcacatcacagattggtgtggctgcctttattttatttatacacaccaaaaccaaagatggtcaatatgcctttcttttttttgttttttgagatggggtcttactctgtcagccaggctggagtgcagtggcgcagtctcggctcactttaacttctgcctcctgggttcaagtgattctcttgtctaagcctcctgagtagatgggactacaggcacgtgccaccgcacctggctaatttttgtatttttagtagagacacggggtttgccatattggccaggctggtcttgagctccagacctcaagtgatccacctgccttggcctcccgaagtgctgggttacctgtgagccactgcgcccagccaatatgcctttcttttaaattgccaactagagtgtgacaagaaagcctttggcctctcgtttgatcaggtttcttgaagaagcttttcgtgaaagatagagtggtagttatttatgtttcagagacttttaaaaaatccatacacaagtctttcaggatcttctcattccttttttagttatttcttttaaaaagtagtctgatatcttaccttacaggttggagaccctgatggattctgcatcgttttaggatttgcctctgattcttgctagtgttctcttttctgtcattatggggtttgccccgttttctctaatgtgctattcctgtgttttggttttgagttcttggttgcatgtgacctgactgcttctggagacagtacagtgcttgtcgtctctcagctgctgcttctgtgtctcaggagggctgagggctgccctccctcgggagcctccgtgcttcctcaggctttgctctttgttctgtacctctcttcacgttacctttgggtggtggttttcattcctgtgccgcctgcttctgggccagtgatccaggtgtctggtgaccacccgggcacagctgcttggctgctgtgggcacctcagcttcccatgtcctgtagggaactcacccaccggccttgctctccacacctcttactcctgtgtcccctttctcggggatgctgccccctcctgctgtcctgtcctctgttaggggtgaatcttgaatccatcttatctcttactctccctccctctcccagctcagtcgggctctcaccctctgtgacccacctcacaacttcacctgtttcattgcactttgcatccgacctcgccttcattccttagttgtctggaaatgctccaggcctctgctgcttctcacctcattccccagaaacagtcaggttctgtctcttaccagaggtaactgagctgctgctggcctcatagctcctgtcgccctcactgcgggtttggttttcctcttatcacagtggtctgaagtgcttggatagtctaggacatccagccccctccccagacagggactccttagggcgtctctgctcccaggctggccttggcccttctggggtgctcaggaaatgggtatgctgtgtgtgggcagtggttggctttaacactagtcatcatgtgtaaggtgatttgaataagtctaaggaaaattgcacttatttttggtgtattttctttcagggttattttggagctgttggagcactccttgagctgttgaagatcccgtgatcattacctggggaggggttcctgaaaccttccacaatgggatctgtggactttcatttttttaagagacttactcaatttcatgactgtactacctgaaacaaagtgagaaaggacaggtgtatttttctaagtcatcaagataaatccttaagaattcagtctaaattagcaaccaggaaggaaaaatatattaaaaacaacaaaaaagtggcacatgtccaggcagtgtgaggatttgctgtatataagttgcctgctttgtatttttgaaatctctgcatcactcattggaagtgcttctgaagagagctgctctgtgttcagttgactggttttgtgtcctgtttgaacttgctgaatgtaaggcaggctactatgcgttataatctaatcacaatttgtcaatatggtcttggcaatcatctgtgcattactctggtttgcattaagcctgtgtgtgaacttactgtaaaacatgttttatttcaaggttctgcaaaattaattgggcaggttaattgtgtacctgaaacttaacaagcagtttttggaagggcagttccacgttactttacactaaatcctgggaatgaatgtctggagagacagggcttcttttcttggcagaatttccttgggtagtgggcggactgttctgatgcaagtgggtacactggcagaagcagcacaatctggaggactaacatgagtcagcagggccactagaattgacaccccctcaggggatcagggagaatctggtttttctttcaggctaagtagaaaaggaagaactgaagtgtctgtcaaagaactcatggggagtggggggtccttcagggcactgtggcacttgggaggtgagtctcagaagactgcctgaggagagtgccaggctgcaggtgctcttggtaggggctgaagcttttctttctgctttgcagaataatttcaaaagcctttcccaaggagagaatgcaccttttatatctgaggtcttaagtggtgcccatattgctgttgaaggcaaggatgggcctgtacaaagcagccttggaccaggagggaaaaccccaaggctctgcagcctccctgctcccctccgtttaaggctgtggtcagggagggatgggcagggtgccagccgcatggaggcagcagagacacccgtgttccagctggggcaaggggaactgatatgtgggctgtgggctgttccactaggcgtggccacctctgcacatgggccttggcacttaggaaatatgggtgctgctgcattgggaccttgtgtgggtgcagagcaggatggctgctgcgtggagggtaattttgtcccctggagagtgattggtgaccctcttccctgctgctgctgtttgcaggctcctggcctatactacctctgacgccctgatcctgagttcctctgccctcctctgctgccagcagcgctgttggtggcctcaccctcctccagtacccaggcaccaaagatggcaccaccatcctcctgcttgtaccacagggtgctgctccctgggccaactcctgtgaacttgctcacttcccatggagaccgaggccagggcctgcccctctgaggcccctgttttgtggtcctgctgcctctgctgtgctgcgttcaggaggttgtccactgctcgacgtgggtcaccatgcagcccttgctgttcccacaatttaacagaaaaggaaactgaacggatgagtaaggctgcccagggtcactcagctggaaaagagtagagctggactcaaacccgggactgtctgtctctggtgcctgagttgggaagacgctgttgatgtccccttctgcctcgctttgagcttcctcctccgtgggccctccccctactctagagaaactagtccattccctcatgttccaccttgtgctcagtaaaccctgtcactccacagcagggtttttgagacagtctcgctgtgtcacccaggtggagtgcagtggggcgatctcagctcactgcaacctctgccttccaggctcaagcaattctcctgccttagcctcctgcgtagctgagactacaggcatgtgccaccatggctggctaatttttatatttttagtagagatggggtttcaccatgatggccaggctggtctcgaactccagaccccaggtgatccgcctgccttggcctcccaaagtgctgggaatacaggtgtgagcccctgcgcccggctcacagcagggttcttgataggccaccagtgaatcccatgccaccgaatctggcattcatttcacagcctcatctcagttctcactcagcagagccctcttgcctgtcctgccacccaggctactaatgttctggttcattctctgctgacagttagctgtggctgtcctcagcctcagtcctgggtctccccaagcagtcattagcatcaccttgactgatttccagggaacacttcaaccaccccttacctctgagctccagccccgagacactgccttctctctgcatttgttgatctctgtgcagcagtgcccacatcctcatcccagcttactgccgtctcaccaccttcaggttgtgaggtgcccataaactctgctgttaccattgccacttccctgtcttagcagctgtccctttcagtctgccctccactagtggccatgaagggggctgtgaccgtggtccaggtgagaaaggaaggcctgaactaagatgggaggtgggtggccagaatggagaggggagaagtggatggccagaatggagagatgcttagagggctgtgttgggaagtggtgactggatacaggggagggaggagagatacaagagggcacctgggctcatttgtggactacgtgattttgagactccaaataagcactgggtatttgggttggagatacagagctgagaatgatatgcatgtaggtgggcaaagcaagggggatttcatgagttctaaggtagggtgagaaaaataaccgagagttgagcagtgacggaggaagctgcaaagaaaacgactgctcagggagaggctggccaggggcctgtggctcaggggactgagaagaggagctctctaggcatctgaattgaggttgcccacaattggttgcaagatcgtggctggccttgatggaagctgggaagccactcggtcctagtgaggggtggtgaggagagcagcaacggccacacaggaaggctttggacgttttttctcctgacactagttatttccaggcctgggatatagctaggggcttggggtgggggcaactctttgcagggtggtgtggcctgtggaggaaacaggctcagttccactactttggccaggtgcaatggctcatgcctgtaatcccagcactttggaaggccaaggcgggtggatcacctgaggtcaggagttcaagaccagcctggacaacatggtgaaaccccgtctctactgaaaatacaaaaataattagccgggaatggtggtgcgtgcctgtaatcccaggtactcgagaggctgaggcagacagttgcttgaacctgggaggcagaggttgctgcagtgagccgagattgctgcactgcactccagcctgggtgacagcaagactgtctcaaaaaaaaaaaaaaaaaaaaatccgctatttcaggtcaccctggtgctggcgttcacgtggaagactgcttatctgtatccagctgtttgcagagctcagggaggccagggggcttcagactccactgtactctgcattccaggattctctgttctctggctgtggtggcctgacacactcttcaccactgaccccacccccgcttgcacactatgccacaggaagggcaggggcttccatcacaatcactcagtactagttaccagctctgatagaattactcaccttgagtttccaagtcttgctgaaggtgcttgcgtaagtggcacatggatgttccctctgttcaaaggcatatgcacaacactatttttcaaaatttgcttttatttacacgtttgagtcaattacatgcatgttttatttttgaggagtgattagcaaaatgcattaaaattttaaaatagcaattaaatatacaaaaatatagcttacaaaaaactgcgaatgtttaaaaatattctgctgcagaatttttagtgtacaaagacgtctatgaaacctgaggttcagcatttcataaacctttttttgagggagttacacaatacctagtgaggaaacccgagggccaaactacaagacgaaaaagtgccccgttcctggcaatgatgtcagaagaccaagaggcgatagttaccagcaacactctaggaagaccagctgtcaccagaagggagttcctaacacttgccacacctgctcccccgaccgggggcctgggagggaagggcagatggagaggaacggtgtgcagtgggcgtgagatgcagatccaccaggcttgggactggcaaagggagctgagaagagagttcccccaaagcacaaacaagtctgctgacactggtggggcccttacagtcacagaagtaaggactggatggtaagccaaaggtgctgatgcttggtcaaaaagtggagtacatctttgcatcttgtaacaatttgggctctacagctgaattggcaaagtaaggtttactacacaagcccctctttttcttctgatatccccactcaaatggaagcacactccccagcacatggggatcccttattaatctttactaaagaaccgtgaaccagcattttccagttatcaactggatatttaggcatgaatctggacatgtccatctgcttaagaaatctgcttaagaaatctgtaacagctacaggaaaagacacacccagggccagagattctacaaatgccagaagagtggatgtgatagagaattttttctcaagttttgggttagggcaccagttgcaattttaatccaggggaggatctgggctgctgctgtagggggcaagtacaccagggaggtgggtgtggacagaggcactgggcagctgctgggaagcgaggcacaagtctgtgcccctactcccagggctgcctggaggaagcagctctaactttcatcagcggggacaaaaatgaacttaaactaaaaaaattattggccgggcgcagtggctcacgcctgtaatcccagcactttgggaggtcaaggcaggtgcatcacgaggtcaggagatcgagaccatcctggctaacacggtgaaactccgtctgtactaaaaatacaaaaaattagccgagcgtggtggcgggcacctgttgtcccagctcccgaggcgggagaatggcgtgaacctgggaggcggagcttgcagtgggccaagatcgtgccactgcattccagcctgggtgacagagcgagactccgtctcaaaaaaaaaaaaaaaaaaaaaaaaaaaaaaaattgttggggtaatttctgttgtcaaatggaaaacaaggcataaagggaaaattctgtaggaagcattttcttttcttgtgtgtttttttgagacggagtctcgctctgttgcccaggctggagtgcagtggggatcttggctcactgcaacttctgtctcccgggttcaatcaattctcctgtcccagcctcctgagtggctgggattacaggcatgcgtcaccacacccggcaaatttttgtatttttagtagagggggtttcaccatattggtcaggctggtcttgaactcttgacctaaggtgatccgcctgcctcggcctcccaaagtgctgggatgttgggattacaggcgtgagccatcgcgcccgaccagaagcattttcttttcaaagtgtgtgcacagagtgaggaggccagcctgggcaacatagtgagttgagacctgtctctacaaaaaaataattacgaaaattagccaggtgtgctggtgtgcacctgtagacgcagctacagactgaggcgggaggatcacttgagtccaggaagttgaggctgcagtgagctacaatggtgccactgcactccagtctgggtaacaagaccctgtctcaacaacaacgaaaagttgggagggaaagggagtagctccatgaactgacgctggacattcaggcatatccacatgagactcactgtgcacttgctcagtagctaagatgtctgccccacaaaatagaagccttcagttgctgctgctcaaactcctgcatcaaagacacaagagcttgcctaagtgaccacaacagttgcagccacacatcaccactggtcctcacttggaactggccaaggtaggggaggggccagcagctgtccaggcacctgcagaggctgctcagagctgggagaggcctgtgccactgctgtcagctacagagcctgatcttgagcatcctgtcgcagatagaaagtcaatcagaaaaatctggttgtgctcttggattagctgggcatttggggtaagggagggactgcagattctgatttgtacagaaaactaaaatttcagtatgttgcaataaaatgaaaatatgtcttactcaacaggagtgtgattgcaaaaacatcccccaattctgggttcacattttgtattctgatttctgggatggctcttcccacattagtaggagcgttccttgaatacacttgtctggtatcacatgagtagaaaaggagaaaaattatatagacacacatacacatgtgtgtacatgcataaatgatctctggaaggatacccaaggaacaaaccaatagtaggtattcatggagtgaggagcggagcttgctaggcatcaggaactcaagaaaggcttttaactactttatgatttgtgaaccacatgaatggattacctattcaaaacattaagaaagaaatattcagcactgaacaaccaagtcagagttcactgtgggcaaaggcagagatgaccaaggaagaaaggggccaggtgaacctgggcctcagggaaagcccctacagctcaggaagctttttggctgaggttctgttcctatcaatcatgatggcagaggagcccatgtaacccagatgatgttatgtggtatcagcagcccccatgacaccaggcctgctgcctaccaggctctgggcaccagctaacccccacaagaggtgccagggacgttactacaatccctgggtggtagctaaggaagctaaggaagagactgagaggctaacctgcagaagggcctaaggctagtgagtgacaagaggtgattccatcactctctgcctggagctctgggtatactgccctggatgtatcaggatgtatttcataatgcccaaaaagcctctgagaaaaataattcctagttgttcaaagtagcttagagcgggatcaggccagggagatgacatgattttgaagtggggttgtgaaaaaggacaaggcccgaggctatttctctgatggatccaaggggcttggcactggggaaaaggatcttcttgtcaagaacagggtatccggcaatggtgggaggtcccctgtatccctcagctcagaccttcccaggggccacctgcccctatttggccatttctgtcctgccttccctggctaggcaagcataggcttcaaggaccttatctgccagggacaggcctaaccaaatcacacgtggcaaagaaaagcagcagatgtcaacttcctagtgtctgatactgacccaaccaggaatcaagtcaggctggttttgttccctgtttctgaaggcagttgaattcagttgtacccctagcaactactaatggttcagccacccgtggagtccagttggggctgagttatgctccactaacccatagcagaccagcaacattctatctttgagctgcttaagaaacacacaaaggataccagccagtggtccaagagcagaccagaatccccacgcagctacacagtaacaagtcccagcaactcctgaagatagatgcggaaagggtgactttaccatggggttcgagtctgagccaagagagttataaaggggtccctaactcattcctttttcaaaataaataaaaaaaggactgtctttcaaacaaaaaccctgcgattttaatgagaattaaaggaggatgtaaattaaaaggcctgtttgtctgtacagcaatgcagatgcgcaggcccatcctggtggaggacccagatgcagggagcaaatattcgggttgtgttgctaagagtcgcaggaactactgctagtgatactaggcttgctgcaggaggatgtcacgctgagaaagggagatgactaggagcagaaaaagtactctcactgttccagcttccagcccaatcctagcagaatgaatgcattttaaaaccagtccacattcacatgtgctgagaaggttgttagtggtccctcatctgggcaaagcagacccaaggtggtgctgagtgcagagtgcagagcattcttgtgctctcctctcatggctggaactatctgggctttgcgccctggtccagtgctacgtatcaaccccctcaacatgcctgtggctctgacacggggggatgaattaacttgcctctgttcaaatatacagacttggtgaggctgtcttttgttagtactgatgcacagggacagaaaaagcctgcaactttcagttgggagaatcctataaaagctgtgagcagcaataatttgcagtattgatcataggaagggaaaaaacattctctttcctattagagccccataacagaggtgacatctgtcccaaggccattccatggaaaatggtggctgctggcaattagtgaggctagtccagaagcaagcctccttctgatattggtcactgaaaacagctcactataaacggggtgttttgtggcattcaactctgttgtgctacaaatagagaatgcaaaaagacggtgaaagtaggagtgcataaatagtttttttcatgggtgccagacaggctaaggctttcatataaaaatattcctcactttcctcgtcctgtttaggaagcagtccagttggcataccacgaataggtcacacataggaaatggcctattttgaccaactggatttgtaattttccaaaccggattctgtccagcactgttctacactaatggaaattttcctcctcatgcccagccatctgaaccaaggacaggttccttctcctaagaggacagaggttggattccagaaaaaaatcctggagtcatgccaagagcagagtagcaaagctccctccatccattctccatgtcacgcagactgtattcctaatgaaaaacttcccccactcacacctgtgggatggagtggagcaaagcagttgacgaggaattgaggcaggcgctcctaagatggagggaggcggagagcagggctgtggaaaagaattttccatctgacctgctactttccatagctaatttatacaatattcacaaatcttaatggactttgagtcatttctagaaaagttggacagaaagagccaaagagcagcatgcgtttctctcctataaagacactttcactttcagtttcggaagtccaaatactgaggcacacaccaacggtggacagccctgcaggagcttcctgaaactatctacaattccaagtggatcaccagcttcagaattacacagggatcttatttgggataaagtgttaaaaagtgaatgacaggcttttttttttttttttttttttttctgaagtagaaagagagatagggcaagagagagaagagatggaaggagggggagaggccaaagggtcggcattcccttcatccagccgggccagaagtatgggccattctcaaaaagccactgctctttggagccactcgagaggttcacagtggctcccttctgaggcagtggcagtgggctcacagcagctacactggaaccacagtgcacatgtggggatgtgggcagcctcctggatcactcagggacagtgtggactcagggcccactccctgctggggctctggacgggccttactggtgcataggagagggaaatgataagaggaaatggcttctgactaggcctttccaagcgcatctcatgttttcagcttagatgatttgatagcaggtgttgtaatcctgagggggaaatgggtgacgaggaacactgctactcaaagccaagatggccttatcaaaggcatacaacatgagccttgtgggcactgcctcaccaaccactggtggctggttgtgctggttttacttggctcaagggctgctgggaaggtttgctgcgacaaaggcctgcatggcctacagagaaacccatccatccgcaggtgggggtgtggcttgaaagacctgctcttagttcccttctttaccctcctgcttgacatggagatgaggctccaggagagagagtgtaatggagttagtaagagaccctcatgaagtttcttgaggcaaacccgcaggctcatccactcctcttctctcggcagggggtagtgtcaaagtgctttggttgtcacaagacccagacacctaggttcccagtttggctggcccaagagttcttcatgaggcaaaagaagtggcagctggtgtcctaggtagagagcagccatacagacaccacatgtgttcctcctggctccacacagacgtcgtgtccagcaacagtctgatccttgcggtaagctatacaatgttctctgccccaggaaggggcccctgagggggtccacggtcctgcttactgtgcaactgggccagctgtagaactggcatgttgcacaggggacacactttacgaacctccagccacttaataaggcacctgcagaaggagacaccacagggggaagatgtcagtcctatgctcatggcacggctgttctgctgaacatctccatatctgtcacccagacaacgtctgctgtatggtccaaggagctcccctcctaggtggtgaacggatgtcaccccctggagagagggaagagacagagagaaggagtggggagaggccaaggggtcagcaatcccctcttccttccagagcctcccatcttccacgtgtgaagccacagatagtatgtgatactctcagttacccatgacttcttacaagaacaaaatacactgagcagggatgtgagaagtaggaaaataaatttttctaacagaaatacaaaacaaaaaattataagaggaagaatattaatatgtctgcaggaagtgggaggagagtgccccacactaccatttatatccagactttattttgattttaaataactatggttttgatttaaataagtttttaggagatgaggctctcagtggaaagttccagctaaatagctgtttattgcttgggctccaagtgtaggctcattttggctctctgcccatagtcctgacgtggtggtcacgttccaccactctgctgtctcctaatgtcacgcacacacacacacatcccacctgtagggtgctgtcagctttctgcattacagaccaatcatgaagccatcaagcttgtctggcactgccctaaaacccaaaagaagttggttgatgtgcctcaaactcgggtcccattaagtaattccataccaatacttactttctgtggaaggcgtgcttacatgggcaaatccccaactcatctcgaggcttgaagtcttctaggcacactgcacagagctgaaagacaaatgcacaaatgaagccaagtgtctgttaagtaccctcccaggtacaaagtagagtgcaggctcctaaaggctcaaccgtttgaagggactcatgagactcttatcttaaaaaaaaaagaaatgaatgaataaatgactgaaaagaaacaggccaaaatagatgaatgtctcctgctcttcctgtcccatatcttcaaggaggtgggcagatgggagaagacagaaagcaagaggcagctgcctttacttcagtgcatcagaagtgtgggaccgagggagggttactctcacatctgccagcttagcctgctgtccctttcctggtgtgccgaaagagctgaggctctctgggttctccaccttgtcagcagcacagcctggctcccaagcactcactgaaagggaccgctcaagccctggcaatcttttctcctgtttttatgcacagcttgcagtaacatgctatttatagttcctggggcctcccactttggcactgtccttctgtcagtgtctctgtcatataaaaagttactgaagactcagttaactcatgaacatgtgcagatgggaccaggactgctctcagccaatgactagtctccatggcttggagagaggcctttgccatcgtacccaggggctgggttccaacactttcctgggcattcaccagggcccgtggataccatgtgtcaccacactgacccattttaccgatgaggaaacagaagctcaggaaaataatgttgcttgaggccatttaattggagagtggccaggcctggctgggacccaggtctgttgcactgatgtgctgttgtgccattgctttctcctgcccagtggttgaactcctttctccctacttgcttccctgtccattcccaaggatcctggttcaggccatcaccatttctagcctggactgttgatggctttgctgttactagtttcttaacctataacacgtaacccagtcttcttagattatgtaacatgatccaggcaggacatgtggctcttggtgcccagtgaaccgtgccatgttggtttttaaacatccttgctgaggtagctttcagggccttgtgtgtatgacagacaggaccttcacaggaggagaatggataactgtgctctgttggactcagcatccctaccaagatggcaggggagcagggaggagagcaggacaggtggctggccttggctcagacacactagctgtgtggcctctgccctcaggattcctcacagagctctgttccttcatctgtacaataaggacatggcctgtcccaccctacacacggctgtcatcagctcagcttggggggtagggttaaggacacagtaaggcagtctaccaatgccagctgtttttattgatgtctacattttataatggaagtactgtttgcaagcccatttttgtcctctgaagggaggctgagaacaagctgtgggtaaaggtaaaaatccagcagtttcagcctagtggtatctttttgggcctcagcttcccacctgtaaagagggaatgatgctcccatctcctagactgtgtgattggccctctggccttcaacagccagttttcctctcagccccgccttccgacacagggtcaggactgtcctctggagatttagcactgatcctgttgaagcacaggttggatgagttgcttatttttattcacttatttttccaggatccaaaattagattagtagcctttccaaacaggagtttctttttttctttttgagatggagtcttgctctgtcgccaggctggagtgcagtggtgcgatctcagctcaccgcaacctccgcctcctgggttcaagtgagtctcctgcctcagactcccgaatagctgggactacaggtgcatgccaaccatacccggctaattttttatatttttagtagagacagggtttcaccatgttggccaagatgctctcgatctcttgaccttgtgatccgcctgactcagcctcccaaagtgttgggattacaggtgtgagccactgcgcccagccccaaaatggagttactattaatggtataatgtgctattatgttctgaataaacagatcctaaaactatagccacctgagaaaaaacaagacaaactctgacacgttaaatgctaaaggtgaccaaagtcaatggcaatcacaaaaagagaaaagcctcagatgacttcctagaagctccctaagagccaaactcattttacaactttcctttacagttcatattttgcaaataaacttttgtttccagtattcaatgagattgtttctccagtgtgacttcccatcaccattaaaaaactgagatacaattaatctactataatattcactcctttaagtaacagtacaattcagcagtttttaggtatatatgtgcagccatctttacaatctaattccagaacatttgcatcaaatgccacccacccaccccccaaaacaagcccatattcataggcagtcattccccattctcccctttccccaatctctggcaaccaaccactaatctactttctttattgatggatttgtctactcgggacatttcatataaatggaaccatacaatatgtaatatttcatgtttggcttctttcccttagcataatgtcttcaaggttcatctatattgtaacatatatcagtacttcactcattttcatggctgaataatattccactgtatgtatgtaccgcattttgtttacccatttatctattgatggccacctgggttgtttctaccttttggctattgtggacaatactgctataaacactggtgtacaagtatctggctgagtccttgtttacgttcttttgggtatgtatcaaggagtggaattgctgggtcatatggtaactctatgtttacctttttgaggagctaccaaaccgatttccaaagcggctgcaccattttacgttcctaccagcagtacgtatgggttgtaatttctccatatcatcaccaatacttattcttgtcttttttactatagttatcataatgggtgtaaatgggtcatttccttaatgactaatgatgccgtgcttattgaccaccacatatcttctttggagaaatgcctattaagtcctttgtcaatttattagttggtttctttttattattaagtggtaagagttctttatatattttagactgaactcccttatcagatagccaactaattttgacaaaggtgcaaaaagcatttcaatggcagaaggaaagccttttcaacaaatgatgttagagcactacacattcatagacacaaaagacacacgcagcctaagcagaaacacaacctaagcacaaccaaagcacaacctaagcaaagaaaccaaaggaaaaaatggataaactggacttgatcaaattaaaaaacttttgttctacaaaagaccctgttaggatgaaaagactgggagaaaatatttgcagacctttttattttgcaggcttcttattactgagttctaagagttctttatacatcttaaatacaagacccttatcagatataaaacttgtgaatactttgtccctgtgggttgccttcactttcaagataatgtcctttgaagcacaaaagtttttaattttttttttgagacagtcttgctctgtcacccaggctggagtgcactggtgccatcatagctcactgcagcctcaatctcctgatctcaagcaatcctccagctcctcaagcctcaacctcccaaatagctgggacttacaggcacacatcacgacacccaactaatttttttttttgtaagtagagataaggtctcctagctatgttgcccaggctggtctcaaactcctgagctcaagcaatcttctcgtcttggcctcccaacgtgttgggattacaggagtgagcctccatggctggcctgatgaagtttaactattttttcttagcttgcttgtgctttagatgtcatatctaagaatccattacccaatccacagctatgaagatttatacatctatgtttatttctcctttttgttttttagagacagagtcttgctatgttgcccaggctggtctcaaattcctggactcaagggagcttccccctcagccccctgaggagctgggattacaggcatgtgtcatggcactgggctcacctatgtttatgtctgagagttttataatattagctgatacatttaggtctttgattaacttttgagtaatctttgtatatagtatgaggtagatgtctaaatttattcttttgcatgtagatatccagttgtcccagcaccactgattgaaaagactattcttttcccactgaattgtcttggcacccttgttgaaaatcaactgaccataaatgtttgaatttatttttggacttgcagttctattccactgatctatatagctatcaatatacctgtgtcacatgtattaaaaactgtagctttgtatagtaagttttgaaattggaaagtgtgagttctctaactctgttcttctttttcaagattcttttggctattctggatcctttacatttccatgggaatttcagaattcatctgcttgtcaatttgtgcataaaagggcagataggattttgaaaaagatgatttggtaaatactttggatattactgccaacttaccaatattacattttctaaccaatgaacatgggatgtcatcccaattatttaggttttattatcttttcaacgttttatagttttcagcatataaatctgggcttcttttgttaaatttattcctaggtatcttatttttgatgctattacaaacgaaaaaaaaattttttttttgaggtggagtttcgcttttgttgcccacactggagtacaatggtgtgatctcagctcaccacaacctctgccttctgggttcaagtgatcctcctgcctcagcctcctgagtagctggggttacaggcatgcaccaccacacccagctaattttgtatttttagtagagacggggtttctctatgttgcccaggctggtcttgaactcctgggctcacgcaatccttccaccttggtctcccaaagtgttaagattatagctgtgagccaccatgtgcggctgaatgaaaattttagaactcaaacaacagaataatcacaataaaaaaacttaatggatgggctcaacagcagaatggaggggatagaggaaagaatcagtgaactagaagacagaacactggaaattactcagtctgaacaacagagaaaaaattactgaaaaaaaaaaaaactctccaggacttgtggaacaacaacaaagggtctaacatttgtgtcactggagttccaggagagagaaagagtgaaatgcagaaaaaacatttatagaaataatggctaaaaacttcccatgcttggcaaaaaaacctatatatttatgaagctgagtaaactgcaaacaggataaatccaaataaatccatgcctagacatatcataaattgctgaaaactaaagaaaaagaaaaaaatcttaaaagcagccagagaaagtgatacattactggtaagggatgaatgattcaagtgacctgatttctcatcagaaatcatggagggccagaaggaagaggcataaaaactgtcaacctggagttccatatacaagaatattcttcaggaatgaaggtgaaataaaaacattctcagatgaaggcaaactaacagaattcatagccagaagacctgctttaagaaaattactaaaggaaagttcattatgaagataaaagagaaatgacataagaaggaaacttgaaacactgggaatgcatagcaacagaaatggtaaaaacctggattaatataaggctgttcctccgtgaaggttttcttatttttttgagaccaggcctcactctgtcacctacgcttgagtgcagtggcgcaatcaaggcttggctcactgtagcgtcgacctcccaggcttgggtgatctttccacttaaggctcctgagtagctgggactacaggtatgtgctacctgtaagtttttgtattttttgtagaaatggggttttgccatgttgcccaggctggtctcgatcttctggactccaggcagatgcctgccttttgagtttttaaaaacatgtctgatggggaaaagacatataatgatgggatttttcaatgtatatagacgtaatatgatagatattgcacaaagaggggaaggaaaagggatccatattgtggcaaggtctctacaatccaactagagtgttaaaaaactaattctaaatatttatttggtaatccctagagcaaccactaaaaaactatacaaagacataaagtaaaaatcacaacagataaattaaaatgaagtactaaaaaatgttctaataacccaaaagaaggcaagaaaaggaaaatagagaatgaaaaagagagagaaaagcagaagacaaaaaaaaatggtaaacctaattctaaatgtatcagcaattgcactgaatgtaaatgatctatacataccaattaaaagacatattggcagagtggataaagaaacatgacccaactatgctgtctacaagaaaactcacttcaaatataattcaatgggtagattgaaaataaaaagatgaagctgggcatggtggctcacgcctgtaatcccagcacctaagaggccgaggggggcagatcacctgaggtgaggagttcaagaccagcctggctaacatggtgaaaccccatctctactaaaaatacaaaaattagctgggcgtggtggtggacatctgtaatcccagctacttgggaggctgaggcaggagaattgcttgaacccaggaggcggaggttgcagtgagccaagattgtaccactgcactccagcctgggcagtagagctagactctatctcaaaaaagaaaaaaaaaaaagaaaagaaaaaggtggaaatacacataccatgcaaacaatcaaaaggaagctggaatggctatattaatatcagaaaaatatttttttttttttgaggtaggttcttgccctgtcacccaggctggagtacagtggcacaaccttggctcactgcagcctaaacctcctgggctcaagcaatcctcccacctcagcctcctaagtagctgggactatacatgtgtgccaccaggcccagttaattttttttttttttgcagagatgaggtctcactatgttgcccaggctgatcttggactcctgggctcaagcaatcctcccacctcagcctcccaaaaagttggaattacaagtgtgaaccaccgtgtccggcctggacaaatatatatattttttgagacggagtcttactctgtcacccaggctggagtgcagtggcgtgatctcagctcactgcaagctccgcctcccaggttcatgccattctcctgcctcagcctcctgagtagctgggactacaggcacccaccaccacgcccggctaatttttttgtatttttagtagagacggggtttcaccatgttagccaggatggtctcgatctcctgaccctgtgatccgcctgcctcggcctcccaaagtgctgggattacaggcgtgagccaccgcgcctggcctggacaaatatttcaaagcaaaggaatttacctgggatgaagacagtttttttttttttttgagatagtgtttcattcttgttgcccatgctggcgtgcaatggcacgatctcagctcactgcaacctctgcctccaggttcaagtgattctcctaccttagccttccgagtagctgggattacaggtgtccatcaccgcgcctggctcatttttgtatttttggtagagatggagtttcaccatgttggccaggctggtcttgaactcctgaccacaggtgatcctcctgccttggcctcccaaagtgctgggattataggtgtgagccacccagcccggcgagagaccttgacaaaagggtcagttcaccaagaagatattcaatgtgtatacaactaacaacagagcttcaaataaataaatagacataatgtattcacaggtcagaagactcaccatggtaaaggtcaattctctccaaacacatttatagagttaatgcaatataaatcaaaatcccagcaggattttttttttttttttgtggatacagatgagctgatgctacaatttacatggaagggtcaaggaaccagactagctaaaacaattttggaaaagaatgaggttggaagaatcacactgcctgattttaagatttactataaagctattaataatcaagacagtgtggtactgatgaagaaacaggcacacaaatcaagagaatataatggagaatccagaaatacagtcacaaaaaatatggctatttgatttttgaaaaaggtgcaaaagaatttcaatgaagaaagcaactcaccataaccaaagctggggatactatggtgaaaaaaatccaagactagatacaaatgaccagcgaaacaggaattggtgggtgtagttggatactaactatgatacatactgatgcaacacacaatgtatttattcaggacaaagtttctaaactaacaggtcacaccagtaaggaagacttctgttctggattaatctggtaaaaatttaatcttttcatttacggtcatcaaaaagactccaaatgggaaacagaccacttttattatttcatgttaattttggccatgtgtcaaaattaacttctaggaaaagtaaaaaatcaaacagtggccggctgccgtggctcacgcttgtaatcccagcactttgggaggccgaggtgggtggattacgtgaggtcaggagttcaagaccagcctggccaacatggtgaaaccccgtctctactaaaaatacaaaaattagctgggtgtggtggcgcatgcctataatcctagctactcgacaggctgaagcaggagaatcgcttgagcccaggaggcggagtttgtagtgagcggagattgcaccattgcactccagcctggatgacagagtaagaccccgtctcaaaaaaaaaaaaaaaaaaaaatcaaacagtaattaatgcttcagtttaatccaaggctaggtctaaaatgccattaaacagaaacatatcaattctttgatgaaaaatatgcagaaagagcaaaggaccaatagatgatttcaaaatatttaacaataatatgattatttttattatgattcaaaaaacctaacaaattaactttctttgaagagactggcaatttagcttcaccacagctaggctatatgcgacactgctattacaacacacagcttttcaagtccttgctttaaacaccaattagaaaacccagaaagggagaaggaaagggtgataaaaaataaaaattctgaaagtttgtagtcagaggcaacacaagaaatagaatgaaaaagaattcttataggctatgtatcttaatgtatacagcaggatatacacacccaagtttgtacttaagttacaaagcacctatgtcccaaccatgcaaccgaagagctaaacaatcccaaggattcatatcgctacctgtgtgttcttcccctgttccgtatgtcttaccttcttcaatccctacccccatgagataactgctctcttttttgtaccattggtaagaaagaaatattgggaacattttcaatggggaaattagtacatactcaccttgagtagaaaaactaacgtatctgtttcctattcatacagcatggacggcaagcagcatccctactgctatgaaattttataatggtgtcatcactattaaaagtatgagttatattactctcgtaaagccttcacacaattgatttttatgtgacctcaccctgaaatattctattaccccaatcaaaataagcctatttttttcaactactgagaataaaagtgtttaaacataccacagcataccactgctactagaaaatggctcaagaggatttacttatcatcaacttacctcatgtaaattcaattcttttactttctcttttaatataacctgtaagacaaaaaagtatgttcttatgcccatttaaatctgtaactttaaatatttctcattatattctcaaatatttttcttttgtatatatggctcatttccctcatattcaatattgaagggaatttcttttacagtttgagacagatcattttagcaacatttttttaacttgagcaatgatgcaatattctcctaaaaaaggaattttggccgagcatagtggctcacacctgtaatcccagcactttgggatgccaaggcgggtgggtcgcctgaggtcaggagtttgagaccagcctggtcaacatagtgaaaccctgtctctactaaaaatacaaaaattagctggatgtggtggcgcctgcctataatcccagctactcggcaggctgaggcaggagattcacttgaacccaggaggcggaagttgcagtgagccgagatcgtgccattgcactctagcctgggcaacaagagcgaaactccgtctcaaaaaaaaaaaaaaaaagtaagtcaatcttaattttgaaagttttgactccgtggtgaccagacagtagttaaaatgaatgccaagtgataagaaggaagtttactatttaagaaaaaactctgagactaaatatagcttattagagttatatttcatcttaaagtgaagaaaataggcaagtaaaatttgagggaaaatctctaaattttggtgtcttacattcctgaactaaaaatggatttgagggtaaatcctgttttcagaaatcacaccagaagctactataaggcctcacagggatatactaaatttcctatccagtatattttaaagatcaaatttactgtatgtcttgtgacttgtctagttttatcagtcaatttcacttaaatgactgcaaaggccaattttactttctagttagcctacatacaaatatcttgtaagctgtcaagattataatacgtggccaggcacggtagctcatgcctgcaatcccagcactttgggaggccgaggtgggcggactgcttgatcccaggagtttaagaccagcctaggcaacatggcaaaaccctgtctctacaaaaaatacaaaaattagccaggtgtggtggtgcacgcctgtaatccctgctacttgggaggctcacctgagcccaggaggcagaggttgcagtgagctgagattgcaccactgcactccagcctgcgtgacagaagcgagaccctgtctcaaaacaaaacaaaacaaaacaaaacagattatgataggagtctgggcaacatggggagaccccatctctacaaaaagtacaaaaattagccgggggtggtggtgtgcgcctgtagccccagctatgcatgccaccacactcagctaaggtgggaggatcacctgagcccagggaggtcaaggctgcagtgagctgtgatcatgccactgcactccagtctgggtgacagagaccccgtcaaaaaaaaaaaaaaaaaaagattatgataggactgagacaaaaagattcattcatttagaaaactaaaatactcaactctgattttggatcccacatgagacctgtaagagtgtggggttacctaaggacatcagtatgtccatctagggaatgtgccagtgagctcagatttcaaacatacatggacgaaagatgaacagaaagataagcagtcctggctgggcgcggtggctcacacctgtaatcctggcactttgggaggccgaggtgggtggatcacgaggtcaagagatcaagaccatcctggccaacatggtgaaatcctgtctctactaaaaatacaaaaattagctgggcgttgtggcagatagatggctgtcgtcccagctacttgggaggctgaggcaggagatcacttgaacccgggaggcggaggttgcattgagctgagatcttgccattgcactccagcctggcgacagagcgagactccgtctcaaaaacaaacaaaaacaagatacgcagttctgaagtgttacagttccataacatcagcgtcagcaaggttaaagactcaaataagctgaagctcccctgtacccaagaagaaagctaagggtaacaaaaattaagaatttcatgcttagagccaaaggaaaatctaggccccctgtttggaagaaaaaaataattttacttggcctttgagaaaagataagtgtattaacttaaagacaaaatcagtgaaggactaggtattgacagctatgatccaagtttgcagacttctagtggataatatgagctaacatttaaagtacaaaagggagtagatgagatcactgtaacacagctggtcgctcacctccgaggaactgctatgtcttctaataaagaaggaaggaaaaatttcacttaatggtatctcagaactccattaagtcgacagtaactttaagaattacaagctatagcatttctctttagcaatctgttggctcaagtttcctgttaaattatatcatctgaactttctacagcttcaagtaatgcttacaaaagaagagaaaagctgggcacagtggctcacgcctgtaatcccagcactttgggaggccgaggcgggcggatcacctgaggtccagagttcgagaccagcctgaccaacatggagaaaccccgtctctactaaaaatacaaaattagccaggcgtggtggcgcatgcctgtaatcccagctacttgggaggctgaggcaggagaatagcttgaacctggaaggcggaggttgctgtgagccgagatcacgccattgcactccagcctgggcaacaagagcgaaactccgtctcaaaaaaaaaaaaaagaagagaagaatacttaagaaaatgaagttgatatattatactgcaaattggcagtgagatgctaaaatgaacacaagtaaattcagtcccagtttaacgtatgagtggaaatcagagttctcagttttttggggggaaaaaaaaaatcaaagccaatctgaattaaatttctcacctgtttgtaggcataaaattctttgtgtgcttgatgtcttagcctaaaagacagaaattagtaatgcaatattgagatttccaacatagtaacttgaagaaaaataaaaagttgctgattttggtattaatttataacatttatggctcaaatgatataaattagaatctttaccctgaaatacacccaaatgatgtatctcttaacatgctatgtgaaagtgcccagggaaccatgaaatgttacccaaacgtaagatgactcaattctttttataccgacagtctacttatttcaataatatttatattttttcttaattagaaaaaatttaagtataacatacatccaatgaagtataaaaaccttaagtatacagctcaaaatcttaaaaaatgtacataccaggataactgttgctcatatcaagacatggtacatttccagcacacctgagccctctaaaatgatccttcctaatcaatatccatgccccagaggtagcactatcctgatttctaacactgtagattaattatgcctgtttttgaacttcatgtaaatggatcgtttggtatatactcttttgtgtttggtttctttcagtctacaatgccttgtgagattcttccatattgttgtagtaattgtctttctgactgacatacagtattccattgtatgaatataataccatttatttatccattttactgctgatgaatatttaattacttcctgtttgaggctattattaaagctgatacacaaattctacatgtcttttagtggacatatatactcatttctgttaagtatatacccgggagtagaactgctggttcaaagtactcacaccgaggctgggcaccgtggctcacgcctgtaatcctagcactttgggaggccgcggcaggcggatggcctgaggtcaagagtttgagaccagcctggtcaacagggagaaaccccgaatctactaaaaatacaaaaattagccaggcatagtggcacatgcctgtaatcccagctacttgggaggctgaggcaggagaatcacttgaacccaggaggcggaggttgcagtgagccgagatcatgccactgcactccagcctgggtgacatagtgagactttgtcttgaaaaaaataaaagtactcaccctggccggacacagtggctcatgcctgtaatcccagcactttgggaggctgaggcaggaggatcgcttgagcccaggagttcgagaccagcctgggcaataaggcaaaacctcatctgtacaaaaaatacaattagctgggcatggtggcgtgtggcctgtggtcccagctactcgggaggctgaggtgggaggactgcttgagcctgggaggtgaaggctgcagtgagctgggattgtgccactgtactccagcctgggtgacggagtgagatcctgtcataaaaaaaaataaagtactcataacaattttacttctatgggtagtttatgagagttctaggtgttcacatctttgtaggttaagtctgaaaaatttttaaatttaaatgaagtctaatttatcaacttttcccaattaggttagttctttttatgtcccattaaagaaatctttgcctatcccaaaactatgaagatattctcctgagtatgttgtgaaaacaatttgttgttttacctaacaaatgtaggtctatgatccatctgaaattggtctttatgtatgctgtgaggtagctttttatcctcatatagactttcatttgcctcaccatcatttattgaaaagattctcccctttccccactgcactgcagtgacacatctgttgtaaatcaggtgtattgaatatgtcggtctatttctagagctgctattattctgctccattggtctatttgcctatccttgtatagtgatgaatgtgtccgcctcagctcccaattcatgtcaaactggaacctcagaatataaccttatttgaaaatagggtcttttcagattattagttagttaagatgaggttatattggattaagatgagccctaaattcaatttgactgctatccttataagaagaggagaggatatgcagagacagacggaaaagaaggccatgtgaacacagagacagagactgaagtgaggcagctacaagccaaggaatgccaaggctttctggtactcactggaagctaggaagaggcaagaaagactctctcctagagccttcagaggaagcatggctctgccagcactttacatttgaactcttctagccttcacaattgtaagaaattacattgctcttgttttaagttacccaatttgtggcactttgttacagcaacactaagcaaccaatgtaccttgtgtcaatatcatgctattttaaaaacttttattttgaaataattttagacagaaaagttgcaaaaaatagaattcacatatacctttctaccagctttcacatttatataaccatagttgtatatactatgtccacattttatacaaccatagtacaattatcaaaaccattaaattaacattgatatattagtattgatataacattgatatattattaactaaactacagaccttatttgaattttaccagttctttctctcatgtccttttcctgttctattatccaatccaggatcccatcttgcatctagttatgtctccttagccacttttaattttttgtttgttttttggagacagagtctcgctctgtagcccaggctggagtgcagtggcatgatctcggctcactgcaagctccgcctcctgggttcacaccattctcctgcctcagcctcccaagtagctgggactacaggcacccactaacatgcccggctaattttttttgtatttttagtagagataggatttcaccgtgttagccaggatggtctcaatctcctgacctcgttatccgcctgccttggcctcccaaagtgctgggattacaggcgtgagccaccgcaccaggccagccacctctaatttgttgagagttccttagtctttccttgtctttcaagattttgacatattaagtatgatcattctttcttggtggaatttgaagatttcaatttaagattggttaagatagtgtccactgggtttctccactgtagtgtatcttgagggagacacgctgaaattatacatatactctattattttctcaagcttttgcccactgattttagcatccaccttgcttgcaataattactgtagtgtttgcctaaactctaatggtggttttgtagttctctaattccttgcacatttattaactggaaatcttctataaggaagagatgtgcttcctcatttatttgtgcaattatttatttctatcagtctagactaatggacattggtcttaatctatgggaagagatgtgcttcttcatttatttgtgcaattatttatttctatcagtctagactcatggatattggttgtaatctatgagttacagttcaatatgatcactactttttgttgctcaaattgattggccttgagtccttcaggctgactcttgtgttctttcaacaagcccccatcctttcccatgcatttccgtatttactggcaccaaaagatgtttgtttcaggctcattttatatgttctgtgttccagccctggggttagccacttcttccaaggaaccctaattccttttattggagaaaagtatttagaacttgagatctgggtgcttggtgaacagcactttctcttaatactgttgctttaaaacaggttttggggtctggtagcaaaagtcctcaagttttattcttttgaatgactggcttggttattcttggttctctgcagttccatatagatttcaatttccaccagaaaaaaaaaaaaaccctcttggggttttgagtaagaatgtacaaaattcacagaccaactgaggaagaactgacatctttgcaagactgagtgtctaacctatgaacattatttctttatttacagctttaatttttctcttacacatttctcctagacatttggtaatttttgatgctactgtaaatagtgttgaaaaaaatctttattttctaattatttcttgctacctatatggaaaaaagtaatttttgtatattgatcctgtatctggtggcttgctaattctaaatagtttctctgtaaaaacttttggattttttaatgtacacaattatgttgtctgcatataatcacaatttaaacactgcctttataatctttatttgcttcttttctaaatacacttttcttttattcttttttcccgtttttttttttttgcactgactagctaggccctccagtatgatgctaaataaaagtgatagtgaatgtccctatcaatacatcactattaagtatgatgttttctttagatattttttgtagatactctttcaaattttagaaagttctcttgtagtactagtttaccaaaaaaaatcatgaataggtattaaattttatcaatgctttatgatattatactattaatgtgctatattgtattgattgcttttcaaatgttaaaataactctcgttcttggaacaaacctcatttggttgtaatattctaccttttttgtagatccctgaatttgatttacaatattttgctgatgaaaaggatcggtctataatttcctttctcataatatccttgtcaggctttgaaatcacaattatgctggcctcatgaaatgagctgagaagtatttgttccacttttattctctggaagtgtcatattggagtggtatttttttccttaaatgtttggatgagttacttggcttaaaatatcattgtgggaatgttttaaaaatacattcaattttcctttcttttcttttggagacggagtctcactctgtcacccagcgtggagtgcagtgcgtgatctcggctcactgcaagctccgcctcctgggttcacgccattctcctgcctcagcctcccgagtagctgggactacagacacccgccaccacgcccggctaattttttttgtagttttagtagagacgaggtttcaccatattagccaggatggtctccatctcctgaccttgtgatctgcctgcctcagcctcccaaagtgctgggattacagcatgagccaccgtgcctggcccaaaacacattctctctttttttttttttttgagacggagtcttgctctgttgcccaggctggaatgcagtggcgcaatctcagctcactgccacctccgcctcccaggttcaagcaagtcccctgcctcagcctcccatgtagctgggattacagacacatgccaccacgcccggctaatttctgtattttagtaaagatggggtttcaccatgttggccaagatggtctcgatctcctgacctcgtgatctgtctctttttcgtattagatatataattattcatattttcaatttcttgtagtagtttttttttttttttgagacagagtctcactctgtcgcccaggctggagtacagtggcacaatcttggctcactgcaacctccacctcccgggttcaggtgattctcttgtttcagcctcctgaatagctgagaatacaggtgtgtgccaccacgtccagctaatttttatatttttagtagagatggggtttcaccatgttggccaggctggtctcgaactcctgacctcaggtgatcccctgcctcagactcccaaagtgctgggattacaggagtgagccaccatgcccggccccggttttttctttttaaaaatttcattcttttatttttactcacattacaactaaccgccttcaagtatacaattcagtggtaagtagtgtactcacaatgttgtccatctaccagctatctctagtttcaaaatttttcatcactccaacaaaacacctggtaccccattcactgatcactccccattaccccttacttctatcccctgcaacctcttatctgctttttgtctctatagatttgcctattatggatatatcatataaaaggaacaatgcaatatatggccttttgtgtatggctttccacctagcatgtttttgaggttcatcctggttgtagtatgtatcagtacttcacttctttttatggctgaataatattccattgtatgtacatacaattatccattcatctgtcgatggacatttgggttgtttataccttttggctattatgaaacatttctgtacacgtttctgtgtggacatatattttcatttgtcttgggtatatacctaggaatgaaaatctgggtcacatggtttaatattttgaagaactggccaggtatggtggctcatgcctgtaatcccagcactttgggaggctgaggcaggtggatcatgaggtcaggagttcaagtctggccaacatagtgaaactccgtctctactaaaaatacaaaaaattagctgggtgtggtggcaggcgcctgtaatcccaactacttgggaggctgaggcaggagaattgcatgaacctgggaggcagagattgcagtgagccgagatcgcgccattgcactctagcccgggtgacagtgcgagactccatctcaagaaaaaaaaaaaagaatttgtttgaagatccaccaaactctttttcacagcagctgcatcattttgcatttctaccagcaatatatgcaagttcttatttctccacatcctcattaacacttgttatttttctgtttttgattacagcatcctagtaggtgtgaagtggtatctcattgtgtttttaatttggaattccttaatgaccaataatgtcaaacatcttttcatgtgcttgttggccatttgtgtaacttctttggagaattgtttaagtcttttgcccatttttaaattgggttgtctttttgctgttaaattttaagagcttttaatatattctgggtattaaacccttatcagataggacttgtaaatatttttctcccattctgtaggttgccttatcactttcttgatgtcctttgatgtacaaatgtttcgcatgttaatatccagcttcccagtaccattggttgaagaaacaattctttccccattgaatgatcttggcacccttatttgcatatcaatttgtcatagatgtttggatttatttctggactctcaattctattttattggtttatatgtctatctttataccagtaccacaattttttgattacagtagctttctgaagttttgaaatcaggaagtgtgagtccttctatttgtttttctttttcaaaactgctttggctatttggggccccagttccaaatgaatttgaggattgctttttctatttctgtaaaaaaaggccattagaattttgatagggattgcactgaatctgtagattgccttggaaaatattgacactgtaactatataaagacgatataaatccatgaacatggggtgcctttacatttatttaggtcttctttaatttctttcagcaatgttttgtagttttcagggtataagtctttcacttccctggttaactttattccttaaaattttattcttttggatgctattgtaaatgggattgtttcctttatttccttttcagattgttcattgttgatgcacagaaacacaactgatttttgtgtattgatcttagactctgaaagtttgctgaatttattagttccagtagttttttttgtgtgtgtgtggatcctacgggattttctctgtataggatcatatcatctgcaaatggagatagttacttctttctagttagatgccttctatttctttttcttgcctaattgttctggctagaacttccagtacaatgctgaacagtagtggtaaagtgggcattcttattgtgttctgatcttaggggaaagctttccgtctattaccagaaagtacaatgttaagttgtgtgtgtgtttttttttttttaataaatgccctttcttgtgtcagttttgatacacctctttttttgttaggaatctatgtaattcacccaaaatttcaagtttattgccataaatgcataatattctttgtgaccttttaatgtttataggatttgtaataatgtccctttttcattagtgatattagtaatttatattttagtaaattatattttataatgtatattttctttcctctttttcctgattagtttttctagagatttaacaattttattaattttccaaagaaccagctttggtctcaataatttttactattatacatttattttctagttcattgatatcgtgcttagcttttttactttcttccttttattttttcttgggtttaactggccttttattttagctccatgaaaacgttgctcattggttttagtctttcttgcctaatatatgaatttaaagctatagctttctcataagtttattaattatgtagttcaaataatctatatccttatagggtttttgcttgttttacattttatttctttacatgaaaaaataccattttcacataaagaaactattttcacctaaagaaataaaatggaccgggcatggtggcttatgcctgtaatcccagcactttgggaggctgaggtgggaggatcactcaagcccaggctgaggaacatagtgggactctgtctctacaaaaaattgaaaaattagctgggcatcagctgggctcagtggctcatgcttgtaaacccagtactttgggaggccgaggcgggtggatcatttgaggtcaggagttccagatcagatcagcctggccaacatggtgaaaccctgtctctactaaaaatacaaaaattagccaggcatggtggtacacgcctgtaatcccagctactcgggaggctgaggcaggagaattgcttgaacccatgaggcggaggttgcagtgagctgagatcatgccactgtactctagcctgggtgacagagcaagactgtctcaaaaaaagaaaaaaagttagccaggcatgatggcgtgtgcctatagtctcagctacttgagaggctgaggtaggattgcttgagcctgggaggttgaggctgcagtaagctatgatcatgacattgctctccagcctgggtgacaggctgagaccctgtctcaaaaaaaaaaaaataataataataaaaataaaaaataaataaaatgaattccattagaagtcattaaaatgaggctttatttgttaattcattttgcttgtttgaatcttttaattagatctgcatgttttcccaaaactgaacttgttacttccagctacagcatggatcaatttgtgctcacctttttcttccatctgtggctcaaaattcatcccttctagaaagttctcccttaaattaacttcattctatgaagttaatttgattcctccattactctaactcccattaattatctaatattttacattgcactattttattttgcactgctaaatagatatctaaaaagtatttaagaaggcatgattaacaatgctgaacagtgctagagaaatgataaaaccgtgtagcttatggccactgcaaatttgtggtctccagtctcagcctgattctccacattgctctctaatccttctatctattcatgctcagtatcctaagctttcatgcagtggttctttcaaacccttgccactctctttaagtgttaccctatcacttcctcccctataattttcaactgtcaattttttactacacaaataaagggggctgtgatgtatgcaagctttctcactcccagctccacatggctacaatatattttgttttctacagctaccctcatctctgtcttaggaaaaggtgttctcctgcttaggaataatattgctatctctcttatgtgtgtctcttttcacctctatgatttattctttcttataaatcttccacaattggctcattctccttaatatatgcatacacataccaaaatctctatcttacaaaaaaacccagcactaaaatacttccttgattctacagcaactcctcccctcaacctaatcttttccagccaaggttcttcaaagacagagttatattccttgtatccactttcacctactagccaggttttgccccattatagcctctaccatccctttccctatgctactgaaatttttctaccaaagattaaggatgcaaaaccttattgtcaaatgtaatgtgaacttttcaattgttatcctctttgttggcagctgacataattgactcaatccattgaaacactacttgtagggcatctttctcacaatattctgtgcccctgtgtgtgtttgttttgagatggagtctgctctgttgcccaggctggagtgcagtggcgcaatctcagctcaatgcaacctccaccttctgggttcaagcgattctcctgtctcagcctcctgagtagctgggattacaggcatgtgacaccacgcctggttaatttttatatttttaatagagatggggtttcaccatgttggccaggctggtctcaaactcctaacctcaggtgatccacctagctcggtctcccaaagtgctgggattataggcgtaagccaccattcccagcctcgattttcctcttatctcctgctatcccttctcagtctcttttaagggctcctcttaaatatcaatgtttccttaggattctgccctgggcccattttattttactatacacattctctctaggcaacactcctggcttcagcttctacctattaattacatgacctcctatttccagatcagacttctcacaagctttagagctacacatccaactaagtattaaacatcttcagacccccatctctgaaatggaatctatcatcttttcacttaaaatgtgcccattcattttctatctctcggaagggattgctatctacccagctgcctaagccagaagtccaagaaagattctaaaccccttctgtccttaatgtccagtcattaatttctgtttattttcacctcccaagtatttcttacaaccacaacatcttttctagatctactgtcattatcttggttcatgacctcataataactgtagccccaaaatttccctgtattcttcaaaatttatttttgagtattattaaaacataatacacaataattgtactatttatggggtacatgtaatattttgatacaagcatacaacgtataatgatcaaatcagggtaactggggtatgcatcacccctctattttttgtttataattttatccaagttacatatgttgtcatatgtggctctacagggttaataacaaaaaatcagcagtcctctgccctcttctcaagagataacccattttttccccctttagctcactattttgatcctgactttcatgtttctaaataacttgcctgtgttggtacttcttgattttttagttttaggcatatctaatgacttcctactagggaaccgttcattcattcacccagcaaatacttatcgagtgcttaatatcgtgccaggcacgattctgagtgtttgagatataacaaacacaacaaataaccatcagggaaaaaatatgaacaaacataaattagaatattatataattcattataaaacaggatctttcttagcaaggtaagatgcccttcttttgtgctccagtagtgccctgttcacagccctaccatagtcagcacattctatactacaatcctgtgtaagactgtggttggtagtgactgtcttgtttagacctaagttatagtcttcctatggttctgatgagtccagtggtggtgactggagggagctctctggagaacagaagaacctcctgggaaggtgctggagagcttaggttatcataaaaaatgagctagggtaattctggaggagctgactccacagatctctagattaactgcaaagacttgttaaatcccaatttaccatttgaagtgttaaaggtaacaaattaggatcatcacaaaggaaagctccttacctcatgattaaattttaaaaattggccaggcgcggtggctcatgcctgtaatcccagcactttgggaggctgaggcaggcggatcacaagatcaagagatctagaacatcctggccaacatggtgaaaccccatctctactaaaaatacaaaatttagctgggcgtggtggcgtgcgcctgtagtcccagctactcgggaggctgaggcaagagaatggcgtgaacctgggaggcagagcttgcagtgagccaagattgcaccactgcactccagcctggtgacagagcaagactctatctcaaaacaaaacaaaacaaaacaaaaaacaatcgtaccaatgactagtaaatgaagtttagaaatgtttgaacatttctgattaaacatgataattcaattttagtgtaacagatcctaatttctttgctttgttagcttatttttaaattttttaatttttatttttttgagacagggtagagtgtggcacaatcttggctcaatgcaacctctgcctccagggttcaagcgattctcatgcctcagcctcccgattagctgggactacaggcgtgtgccaccacacccaactaatttttgtatttttagtagagatggtgtttcacttgttggccaggctggtcttgaactcctgacctcaagtgatccgcctgccttggcctcccaaagtgctgagattacaggtatgagccactgcacccggcctgttaggctgattataaaaaaggataaggctgggtgtggtggctcatgcctataatttcagcattttgggaggcagagctgggaggactgcttgagcccaagagttggagaccagtctggaaaacatactgagacttcgtctctacaaaaaataaaaaaattagctgggtgtggtggtgggtgtctagagtcccagctactcaggaggctgagatgggaggatcacttgtgctaggaggttgaggctttggtgagcctcatgtcactgcactccagcctgggtgacagagtgagacactatcttgaaaaaaaaaaaaaagatacaaaaggataaaattaagtacatatcattattttttcattatcactttacttatttgcttgattattaaaaggaatacaatgaggtaaaagggtgtttcataacttacttttcaaaaactttgcccagaatcacaaattggtacattagtgggtttttgtttgtttaaagttaaaggcttacttaattctttgacatagtaatgaaaactatattatgagctatatattttagaattaaatattttacatatgataaccctcccttaataacattttcttttttttacattttgttatatttttatattttttgcctctttaaaaaataatttggttttgaatattaaatttacatatttctaagttaaatcaacattcgtagaggaattatcaaaaaaaactagtaagtctgaaaaaaaaaccatatttttatattctgaggtcctatatatgctatggctaattctctaattttaaaaaatgctgaatatttacataatgtttatcaaactattattaatttatatttgagtgctttattatattggaattgcagtaatattaacatttgtataaacacacaaaaccttgtcttttcttgctagaaagagatgtaaaaatctgaactagttgaacagtcttaactcattgtctagccagatgtggtggctcacccctgtaatcccagcactttgggaggttgaggcgggtggattgcttgaactcaggagtttcagaccagcctgggaaacattgcaaatccccatttctaccaaaaatacaaaaaaaattggccaggtgtggtggcaggcacctgtagtcccagctacttgggatgctgaggtgggaggatcacttgagcctaggaggaaagctgtagtgagcagagactgtgccactgcactccaacctaggtaacagagtgagaacccatctcaaataataataataataacaataaagaactcattgtccattggtaataataaatgtgtttacgatgcaacaaaaagtgtaacacaaaaatatattaaatgctgcagcaagtatttacatatatgtacctcatttttttttctttccactaaggaaggtgcttgtctacaaatagacaaacacaaatgctttggtgtttacaattacaaacaccccaagtctagaacttaaaagtggcagtactttttttgggacttcttcagttaacagttactttacacagtgctaaactttttactcttaattacatttttggatgatatttatatcccattgtcctagaacactgtgatcaaactatttttttttttttttgagacggagttttgttcttgttgtccaggctggactgcaatggcacgatcttggctcactgcaatctctccctcccgggttcaagggattctcctgccaagtagctgggattacaggtgcccaccaccacacctcgctaatttttgtatttttagtagagactgggtttcaccatgttggccaggctggtctcgaactcccgacctcaggtaatccgcccacctcagcctcccagtgttgggattttggacgtcagccactgcacctggctgatctaattattttaataatagtttaatagaaatgtcagaaaaaggaatttctggaaataaacaggttttataaaggttttttctgtagattacaattatatttgtctcaagtatttaattaatttggaggaagaaataaaagtcataagcagtcaacatatctatgagatataaggagcatcccctatgtttctttattattttattttttgagacagagtctcgctctgttgcctaggctggagtgcaatggcacgatcttggctcactgcaacctccacctcctgggttccagtgattttcctgcttcagcctcccaggtagctgggattacaggcatgagccaccacgcccagctaatttttgtatttttggtagagacggagttccaccatgttggccaggctggtcgagaactcccgaccttaggtgatccactcgcctgggcctcccaaagtgctgggattacaggcatgagccactgcgcccagccttccctacttttctgatacctaatgaccttagctaacaaggaagccacaccttgaaaagcaattttgaaatctctgtgagagtagattaaatcttggagatagacaatgacatacgtgtatctgtttaccaggtagaagggcagaaaaataaataaggacaattttctcctacagagtaaaacacttcatcagtagataagattgaagatcatataaaggtgttttactgattactaatgcacagattaaaacggtaagccatcttaattttttaaaaatttgccaattatcatacttcattttaaaaaaaatctgaggacagaaacttgattattgattatttaacatattttgaagtaacatagaatgaaaattggttacctaatcaagtagcaacagaagagtaaactaaggatgaagacaaatatagcagtaccaaaaaccacaatatatatgttgagaggcagattctggaatccaatattaggcatcctgaagttgtaatgtgggaaatccgagctcatggatgaactgtgggggaagaaaagaatggaaaaaaaataggtaaagactaagaaccaagacagcattatcattgtgcacgtatagaggcacaatgacctcatctgaaacaaatatggtagacaaagtgttaatattcttgccattcattcattcattcaccatgccaaatatttactgagtattatgtacctggcactatttcagagactggagatccaatataaaaagctttgcaagttgcatttattcactaaaaggcatttcactaaaataatgccagtaattaataaacatgaaaatgttcaacctcagagaagtgcaaaaagaaaaaaagttttaagattcttcaaactctttagcctttaacctaataactcaacccttgaagtaacaatatttataatggtaaaatattagaaataactgagatatctcacaaggaaatatgattaattatatagtcatatgttatagtattaaagggtcatgaaaacattttcaagtaattttttttttcttttgagacagggtctcattctgtcaccccaggctggagtgcaatggtgtgatctcagctctctgcagtcttaatctcccgggctcaagcaattcttccacttcagcctcccaaatagctaggactacaggcgcgtgccaccacacctagctaatttttaaaaatttttttgtagagatagcatgttgcctaggctggtcttgaactcgtgggctcaagcaatcatccctacttggcctcccaaagtgctggtattataggcatgagccactgtgcccggccaatttctccccattctatacacaaggaaactgaagcttagacagttctggtcccatggccatgactgacccggtatgtacacagccagagcctctccaactccaaactcagcagtctcagtccatatgctccactgccttgctcatgtgttacttttataatcagaaacagtaagtgttgtttaaacattaaaaaaaaggactatttctgtcagtttgtttgagaatacttactgattactacagttaaaattccacagataaaggatgcctctcctgtaagtgataagctgtagtttgtcattttgattccttacaaaataaagagttcctgccaggcctgcttattaagaccaaagattgacaatggaattataactatgaatactacaaatccaaacccaaacaaaactctaccaagcaaagaaaacttctacttttatttatgcatggtaaattaaaaatgtgttcacagatttttagttttcttgtaggttcccagaagagtatatttatactgttgacaccactgagatgctaactggctgtatctgaaatctaaatcttatgattagtttccagtctctagtaacatatatcaggaagtcagtacctgcaaagaacaacttcatcccatgtaaattcttctctgacagcttccaaacataaataatgggtaatatttaattttgaacctttggccattttctgggttggctcagttagagcaagtgcttttactcaaatacatatttaatttcctttttcctacattcagatcttcttacgaagggaaggaaggatgtagttaaggagtgctttaccaaatatacatagcacatacgctgtggagctattagaaaattacagggcacaaaactcagctcttaactttcatattgctgacagggcctcacttgatgacccttgttatagccaagacttagatggctgtcctttaatcccttagaaatatccctccccagacaagactggcttggtaaaatatctctcaccttagaaaataagggattaggccaggtgcagtggctcacacctgtaatcccagcactttgggaggctgaggtgggtggatcacctgaggttaggagttcgagaccagcctggccaacatggcgacaatgtgtctctactaaagatgcaaaaattaactgggcgtggtggcacacacttgtaatcccagctactcaggaggctaatgcaggggaatcgctcaaaccagggaggtggttggttgcagtgagccaagattgctccactgcactctacctgggtgacagagcgagattccatctcaaaaaaaaaaaaaaaaaaaaaaaaaagaagaaaataagagaataaacatctgtactgggcaagctaagaggaaataggcaagtgacagaaagtggtatggtagaaagacggagaggtttgcagtcagcaaagctggatgcttgctcccaggatgtcactagctaaatgtcagagcttggcccatctatacttcaattttctcatctttcaaatgggataatgggatattcaaatgggataatctaacaactttaaggaattcctgaaaggataaaatgagatagcagataatgaagtgtctgaaaactcaaagaggacaaaactattaaggctttagtgtgtgtgtgtgtgtgtgtgtgtgtgtgtgtgtgtgtttggggaaagggaatgacattaaatgaaagtagtaaataccataaaggaagccttgacaaaaatcatgtctctggagaggattccaccaaaccaagtgccccttccacagggagctcttctgcatgcactgacagctttctgtcaggtggcctgccaacctggcctccagatgcaggaactagaaaccatgtctggccaaaggcagccattaatacaggctagctaggagtgaggccagtggtgtgggaatgttgccctgcagagttcttgaaattggtacaattcttgtagcattctgtacaaagactcagacacacacagcagtagaggtagtagcactgtcatcagagggaagagacatctgccttagtgctgctgggggctggatgttgagacttttgtgagtcctcactacctggcagggccttttaataaatcccaattaccagagggatccaggctggtagaagatatgttgatgcgaatatattttaggaatttttctctctttgttttagtaaataaaatggcttcactacaattgatatgttggcccaacaattttaagtagatggtagagtattccaagatgttaatcctgatccagtgacacattagtttttacaaaatttttatcataatgtattttcaccagaagtattaatcttttaaaataaattgataaaaggctacatatcatcttagtaatatgcattctttgctattgaagtcttacaaatataagttatttagtaattgctccttgtgggagtgaagaggagaaatagaacatacagtacactgttgtagcttacttggcatttccaacttcattcacgtgaaagcctttttttccccttatgtaaattcagttcttgaaatctctagcctcagcctaaatttcaaaccacccagtcagtttattaaaatcaaaccaaaacaaaaaaaaaagacaagaagatttgagtattttatcagcaatcttagaaccaagaagttctaagagggacagattacttgagatttggatgcctacatgacctgagtttaacacaatacaccacagctaaatggggctgcagtagcattcctcaaagcatgcttggtagccacattcttcttagaccagttcctgttccctggacaataccatatcatcttcccaggagtcaatattctagttttgcttcaaaaatgctcagaagtgccgggtgcagtggctcatgcctgtaatcccagcactttgggaggctgaggcgggcagatcacgaggtcaggagatcgagaccatcttggccaatatggtgaaactctgtctctataaaaatacaaaaattagctgagcgtggtgacgcatgcctgtaatcccagctactcgggaggctgaggcaggagaatcccttgaaccatggagtcggaagttgcagtgagccgagattgcgccactgcactccagcctggcaacaaaaaaaaaaaaaaaaaaaaaagaaagaaagaataaaaaatgtaacaggtggctgggtgcggtggctcacgcctgtaatcccagcactttgggaggcccaggtgggcagatcacgaggtcaggagttcgagacctgcctggctaatgtggtgaaaccccgtctctactaaaaaatacaaaaattagatgggcctggtggcgtgcgcctgtaatcccagcttctcaggaagctgaggcagattagcttcaacctgggaggcagaggttgcagtgagctgagatcgcaccattgcactccagcctgggacagagcaagactccatctcaaaggaaaaaaaaaatgctcagaaaggggctgggtgcagtggtacatgcctgtaaccccagtactttgggaggctgaggtgggaggactgctcgaggccagggatttgagaccagcctgggagacacagggagaccccacctgtacaaataaaaataaaaattaaaaaattagttgggcatggtggcatgtgcttgtagtactagttactctggaggctaagatgggaggatcacttgagcccaggaattcaaggttacagtgagctatgatatcactgctacgctccagcctgggtgacaaagcaagactatctctaaaagagaaagcttttgacatattagaaggaactaacttctttgttatttattgagtatctttatgaccacatgaaacaccttctgcaaaatcttttcttgagtgggtggatgagaggaaagattaaaaattttaaaaacatgtcactgatcagtagaaagacctaagctttctgatgaaatggatacactgggttctagagagaattattttaaaaataagacctatatttggacagatcctagtaaaatttctgaattctaggatagaaaaactgtgataagtttccaaaaaaaaaaagttgttataatggaaagcatatagatttgagatttatcctaggccatgagtattagagtgggcttatggagtcagagagccaggggtttaaccacggatttgtcagtaatttggggcttgtttcttatcttttctatgtctcggtttcctcatctgataagacagaataatactagtaactatttcataaagttttaagggaattaaatgactcaacacacgaaaagcacttaaagcacttagaacagtacctgggcacatactgtgtacttgagaaatgttagttttcattattaactaaaatgcaacaataaaagataatggaatcactgtctgtatctccattaaaagacagtcaggtagacttctgactccagaaagatggcatagacatacatttccctatttatccagctaaatataactaaaaaccatggacattaagttggacagaaggtagcacactaactagggacctggggacccaaggaaccacatgttaacgagttctctgggctttgtttttgtctcctatatcccagacttagagctggcaaagttggcaaacaagaatgtcaacaggtgaagacaaaaaaaaaaaaaagccctaatgaacgtgttctctctagccaaaggatgacaaaaggagtagttaacaagactgaaagcttttaaacaagaattgccctacttcagctaaacaacccagaaaaaactatggccacacccctatagacatgccagcaaaggctgaaggcagagcctagattttcactcttgccaggatgtaacgagatgccccccagccatcttgctgggatagtgttagaaaaggccaagtaggaagctgaaatctgttttttttttttttttgagatggcgtcttgctctgtcaccaggctggagtgcagtggtgtgatcttggctcactgcaacctccgccttccaggttcaagcgattgtcctgcctcagcctcccgagtagctgggactacaggcgcccaccaccatgcccagctaatttttgtatttttagtagagacagagtttcaccatgttggccagctggaatttttacacaacatggtgaaaatgaggctccacctcagtgatatcagtagagactacatgtggaccctgacttctacccctatccagcagtaacaaagtgactatactcctcctcaatggggtgatgacagaggaggatctcgtgaagaatcgggattttaccaccaccaagtggcaacaagcactcctaccttttccagccaaagaggtatcagtgaaagcctagttgagagctggaactcccattcctgccccgtccccgccccccatgtcaataaaggctaaatagggaacctggacttctacctttacctggcattaatgaagcagcattacaacccaccgtttcactgtcagagtgctgtcaaaggaagccagttaacacatcaggtttaaaaaaaatccagagtctcataacataatacacaaaatgtccaggtttcaactaaaaattactcatcgtaccaagactaggaagatcacaaatcaaatgagaaatgataattaacagatgctaatgtcaatgacaaaaatgttaaaattatctgacaaagattttaaagtagccgtcatcaaattgtttaagcaagcatttatgaacatgcttgaaacaagtgaaaacactgaaattctcagcaaagaaacagaagatataaagaggaacaaaatggaaattatagaactgaaaaacacaataattgaaataaaaaaactaaaactaagcgatgggctcaacagcagaatggagaagaaaggggaaagcataagtgaactagggccaggcacggtgactcacacctgtaatcccagcactttgggaggccaaggtggatggatctcttcaggtcaggagttcgagacaagcctggcaaacatggtgaaaccctgtctctactaaaaatacaaaaattatccaggcatggtggtgggcacctgtaatcccagctactcggcaagctgaggaatctgtacataagtgtacagatttaagaagctgaacaaactccaaagagaataaacccaaagaaatctacaacaagacacatcgtagtcaaacttctgaaaactaaaacaacaacaacaaaatctttttttttctttgcagaggtaattgagttaaaacaacactaaaaaatcttgaaagcaactaaggagataccattgggggaaataatatgaaagacacagatttctcatcagaaacaatggaggccaaaaggaaggaacacatttttcaagtgctgaaagaaaagagccatcaacccaaaatcctacatccagcaaaaatacccttcaggaatgaaacaggaaatcaagacagcctcacatgaaggaaaacaacgggaatttattgctagcagacctactcttgaagagtgactaaaggaagctgtcttaacagaagggaaatgataagaaaaggaaccttggaacatcaagaaggaagaaacaacatggtaaacaaatataagggtaaatacaataaacttccttctcttgagttttctaaattatattcagtggttgaagaaaaattataattgtccaacccggttctaaatgtattcagaggaaatatttaagatgagcatattaaaaataagggaggataaagggacataaaaggaggtaacatttctagtctgaactggtaaagtatactagtagactgcatatataatacaatgcctacagcaatcagtaagaaaactatacaaagacatacactcaaaacactacaaaaaatcaaaaaggacttcaaaaaattactcaagtaacagaaacaaaaatagtgaaaacaaatagaaaacaaagtttaaaatggcaagcttaagtataaatgatttaaatatgccaattaaaacacagagactggcagaatgaattaaaaaacatcacccaataatatgctgtctacctgaaactcactttaaaaataatgatacatgcatgttgaaaaggatggaaaaagatatgtaatgcaagcattaatcaaaagaaagcaggagtggctatattaacatcaaagcagatttcacagaaaataaaattaccagagagagaaagaaacattacctaatgataaaatggtcaacccactaaaaatacatagcaatcctaaatgtgcatgcacaaaacaacagagctgcaaaacatgtgaaggaaaaactgactgaactgaaaggagatataaagaaatctataattatactcaaatacttcaaaaccttctcccaacagctgatgaaacaactagatagaaaaccagcaaggataaagaaaaattcaacaacacaattagacaacaggatctactcaaaatatatagagcactctacctagcaacagcaaaatatacattcttttcaaatacccatggcacctacaccaggacagaccacattcctggtcataaaacaaatctcaaacaacctttcaaaaatcgaagtcatatagagtgtgttactggacatagttgaatcaaactagacatttataacagaagggtagcaagaaaatatccaaacacttagaaactaatcaacacactactaaataatctataagtcaaaaagaggtcttaaaagaaatttttaaaaatacactgaattgattgaaaatgaaaatacaggctgggtgtggtggctaacgcttataatcccagcactgtggagggccgaggcgggcagatcacctgaggtcaggagttcaagaccagactggccaacatggtgaaaccccatctctactaaaaatacaaaaaaattagtcgggcgtggtggcacgcacctgtagtcccagttactcaagaggctaaggcacgaggatcgcttgaatcctggcggcggagattgcagtgagccgagatcgcgccactgcactccaacgtgggcgacagagtgagactccgtctcagtttaaaaaaaaaaaagggctggacgggatggctcacgcctgtaatctcagcactttgggaggccgaggcgggtggatcacatgaggttaggagtttgagaccagcctagccaactaggtaaaaccccgtctctactaaaaacacaaaaattagctgggtgtggtggcaggtgcctgtaatcccagctactcgggaggctgaggcaggagaattgactgaacccgggaggtggaggttgcagtgagctgagattgtgccactgcactccagcctgggtgacacacgcgaaacgccatctcaaaataaaaaaaaaagaaaatgaaaatacaacatatcaaaatttgagagacataggtaaagtagtgctgagtgggcaattcatggtactaaacgcacacataagaaaataaaaaatctcaaatcaataatctaaactcctacatcaagaacccagaaaaagggcaagttaaaaattaaagaacagaaaccagttaaattgagaataggaaaacaatagagaaaaatcaatgaaacaaaaagctgagtcttttctttgaaatgatcagtaacactgacaaatctctaggaagaatgacaaaaaaaaaaaaaaaaaaaaaaaaagagaagacacaaattacctatatcaacaattaaataggagagatcactacagacactgcagacatcaaaaggataagaagggtatacacacatatacagacataaatttagtaacataaataaaacagaccaattcctcaaaaaacacaaactacaaaaactcacccaatataaaatagataatgtgaacagttttataactatcaaagaaactgaattagtcatttaaaaattcacaaaaaagaaagctccaggccaagaggcttttaccagagaattctaccaaaagtttaaataagaatgagcacaaatccttgacaatcttttgcagagaatgggagggaacatttctcaaggcattttttgaagccaatgcgaccttgatagcaaaaccagataaagacagtgtctggcaaatacagacagaaaaattcttaacaaaatattagcaagtagaatttggcaatatgtaaatagaattttacaacaccatgaccaagtaaggtttattcaagagatgcggggctggcttaatattaaaaaaaaaaaaaatcaatgtaatctatccatattaaatggctaaagaagaaaaatcacatgatcatattaactgatttaaaaaaaacacatttcacaaacatcagcacccagaaattaaaaaactcccagaaatagaaatggaagagaacttcttcaacatgttaaaaagcatctacaaaaaacaaaccggcaaaaaccaaccaaacaataacaacaaaaactgtacagctaatattattcttaattgtgaaagactgaatacttacccccctaagaccgggaacaaggcaggatatctgctctcaccactcttattcaacatagtgctggaagttctagccagtgcaataaggtagaaaagggaataaaaggcatacacatcagaaaggaagaaattaaactgagcctatttgccacatcaacatctacaacaacaaaatcccaaagaatcttcaaaaaaatttctaaaactaataaatgagttcagcaaggttgcaggataccagatatacatataaaaatcaactgtgtttttataaattagcaatgaacataggaacactgaaattataaatacaatgacatttacaattgttcaaaaaaagaaatacaaagaattaaatttaataagacattagatatgtacaggacttatatgctaaaaatgacaaaatgatgattagaggaatcaagtaaaatctaaataaatgcagagacatactatgttcatggatttgaagactcagcataggaaagatattctctccaaattgatatataggtttaacataattcctataaaaatcccagcaaattttttttttgtagatatagacaagtttaacaaatgtagacagaaagaaagacaaggaaataaaacagctaaagcaattttgaaaaaagaagactaaagggagaggaatcagtctattcaatgtaaggactcatcatagcctaatcaagacactgattggttttagcaaaaggatagacacataagtcaatggaacaaaatgaagaacccagaaatagacccacacaaataagcataaatgatttttgagaaatgtgcaatcctttctcaatggagagagtatatggtcttttcaacaattagtgctggaccaatgggacatccataggcaaaaaaattgaatcttgatcttaacctcacacacaaaaaaacaactcaaagtggatcatgaacttaaacttaaaatgcagaacaatgatacagttacaaaaaacctaagagaagatatttgggatctaggattaggtaaaaagctccagacttgacaccaaaagcaaggagtataaaaggaaaaattgatacactggacttcattgaaatgaaatgttttttttgctttgaaaaactgtcaagaggatgaagaaagaagctaaagactaggaaaaaaatatttgcaaaccgtatgcctgataaagggctaatatctaaacacaaaattcaatagtaaaaaaacaaccagttatgggttgaattgtgttctcaaaaagatatggtgaagatataactcccagtacctctgaatgtgactttatttgaaaataggtttgttgaagatgtaattaattcagatgtaattaagaagttaaagttatactagagtaatccaatatgactggtgtctttataagaggaaaagagacacacagagagagatacaggaggagagaatgctgagtgatataagaagcagagactgaaggattgctggctgtcatcagaagagaggcatgaacaaatcctttctcagagccctcagaaggaacaaccttgctatttttttttttgcaagtgattctcctgcctcagcctccctagtagctgggactataggagtgcaccaccatgctctgttcatctttgcatttttagtagagatggggtttcaccgtgttggtcaggctggtcttgaactcctggactcaagtgatctgcccaccttggcttcccaaagtgttgggattacatgtgtgagccactatgcctggccaccaacatcttgatttcagacttctaaaccccagaattgtgagacaatagattttctgttgttttaaggcacccagtttatggcacgttgttaaggcagccctaggaaacaattcaattagaaaatgggcaaaagagatatttcaccaaagggaatatacagatggtaaataagtacataaacgtatgttcaaaatcattagctattagggaaatagaaattaaagccacaatgagaaattactaaattaaacctatcagaattgctaaaataaaaaattgtaacaacaccaaatgctggcaagaatgcagagaaactagagcactttatcttgttggtgggaatataatatggtatagccactctggaaaatagtttgtcagtttcttgtaaaattaaacatgcaactgccatacaactcagcagttgcactcctgggcatttattccagggaaatgaaaacctatgttcacatacaaacctcaacacaaatgttcatagcagctttatctgtaatggtctaaaattagaaacaacccaaatatcattcaatgggtgaacgattaaacaaacttgaggtatgcacatcgtcaaatgccactcagcaataaaaagaaacaaactattgatagatgcaataatcagagtcactttccagataattatggtgaatgaaaaaagccaatcccaggttacatactgtataagtacacttatcttgatgtactgtaagaaatccctgatgtgatggaaaccttctgtatgttgactgtatcaaagttaatatcctggttatgatattatactatagttttacaagatgttatcattacaggaaattgtgaaaagagtacataggatctttctgtactgtttattgtagctgcatgtgagtctataattaaaataaaaattttaattaaaaaatatacaatggagcaacatctatacaggtctgatggaaaagaactgtgatattagaactgtatatccagccaaactatctttcatttgtatagaaaaaaaagaaagaaggaaaaagacattttcagacattcaagtacatttctttctctttatataggtacgtaatcattccactaattaaaatcccccatagtaatctagattaaggcttcaggttatttcagcaaagcatggaagatggaacggggagaagaaagttaagttgtgctaatagttttattttgaaaagctataactacttaatttaaaaagttgttacagaagtataagtctaaatacgtgttttaaaatgtagggagccacaaacagtatgtataattttcatgactagcagagaggaaaaagcagcaaagaaacctggataatttcagcaaaatatagggtaaaaaggggaagaaggggggtcataagaaagcaaattatagaaatataaaataaaatggtaggaacaaaacgaaaaataaatcatgagaaaaataaatggtttaaatcctatttaaaaaggctctaggccaggcatggtggctcacgcctgtaatcccaggactttgggaggccgaggcgggcggatcacgaggtcaggagatcgagaccatcctggctaacacggtgaaaccccgtgtctactaaaaatacaaaaaattagccggatgtggtggtgggcgcctgtagtcctagccactcgggaggctgaggcaggagaatggcatgaacccagaggcagagcttgcagcgagcagagattgcgccactgcactccagcctgggcgacacagcgagactccgtctcaaaaaaaaaaaaaaaaaagggctctagcttccacgatttggcacacacacaaaaaaccccagaaagactctaggatgaggagaagctggttaacacgtacaaaaatacagttagacacaaagaataagttctagtattttacagtgcaatagggaaactgtagttaatactttgttgtattccaaacactacgaaatgaagaaaactaatttttttttttttttgagatggagtctcactctctcgcccaggctagagtgcagtggcgtgatctcggctcactgcaacctcagcatcctgagtagctgggattacaggtgtgtgccaccatacccggctaatttttgtatttttagtagagacggggtttcgccctgttggccaggccggtcttgaagtcctgacattgtgatccgcccaccttggcctcccaaagtgctggaattacagacatgagccaccacgcccagccaagaaaactaaattttaaaagtaaaaaaaaattaatgtatatttcaaaatagctagaagagaagaatttgcaatattcccaacagagaaaaatatttgagctgatatctcaattaccatgatttaatcattatacattgtacacatataccaaaatatcatgtgcccccaaaatatgtacagctatgctttaatcaaaaaagactctaaaattatataagaacaatattcagctttattataagaaaacactttaaatgattctaagatatttttaaatgcgggatgcaataagaaaataaacaaaaatatagcaggcaagtataagaaagcaagcaggagtgctaattatttttaaaaaaagtagaaataaaggctaaaaagctatatgaacaatgatgttttatagtgatagaaatattaatctccaaatgagatataacaaaaaagaggacataaacaataccattaacaaataatatatatattggctgggtgtggtggctcatgcctgtaatcccagcactttgggaggccgaggtgggtggatcacctgaggtcaggagttcaagatcagtctggccaacatggtgaaaccccatctctactaaaaatacaaacattagccaggcgcggtggcgtgcgcctgtaatcccagctgaggcaggagaaacggttaaactcggaaggcggagggtgcagtgagccaagatcgcgccactgcactcaagcctaggcaaaagagtgagactctgtcaaaaaaaaaaaaaaacccaaaacaaataatatatatatattatatatctacgtatctatactgtgtgtgcgtgtgtgtgtataactttgtgtcttaacaaagaaaacaccttttcatatgaatctggaacatctacatttagataaactatttatcatgctataggaagattccacagaacagaactcttagaggccacaatacgtgactacaatgtgtaaaattaactcaacaataaaaagataaacaaaaggaaactacttataaattcaaaaaataatctttaaaatgacttcaggccaggtgtggtggctcacagctgtaatctcagcacagcactttgggaggccaaggtgggtggatcacctgaggtcaggagttcagaccagcacggccaacatggtgaaaccccgtctctactaaaaatacaaaaattagccgggtgtggtggtgggtgcctgtaatctcagctactcaggaggctgaggcaggagaatcccttgaacccaggaagcagaggttgcagtgagcagagattacgccattgcactccaacctaggtgacaagagtgaaactccacctcaaaaaaataaataaaataaaataaaataaaatgacttctgtctagtaagtaactaaaacaaatcacagaccatttagaagttaatcacattgtgggaaaaaaatctcatactgagagaaaaatccattaccttcaacatgggaaaagtattcttacaggctactgtgtaggtgtataagtgtaactgatcgtattatcaatctaaaaaagaataatgaaaataaatggacacaagaattcaattctggaaagtagaaaaagaacaaatcaaacaaaataagccagaagaaggaattaataaaggtcaaacaaaaatgtatgaattaaaacaaaacaatgaaaggaattgaaatcaactaaccaaaacactaagaatgagacagataaaaaaattcttatgcagagatttaaaaacatccatgagataatttgagtattaattttaaattctagaatagattttataggaatataaccaaaactggctcaagaagaaaacttgaaaatatagaaatatcttcacaaaaaaggcttcagaccccaatggcaatgaaagtggaactcgctaaacttgcatagataagtagtctgctatgtacagtagtccctgcttatcgatggtagatatgttcacagacccccactggatgcctgaaaacccggatagcaccgagtcctacgtttttttgaactgataaccaagaccctaatgggcaggtagtgtacacagcatgcagacactgggcaggggatgattcacgtcctgggtgagatgcagtgagcacgacagcttgagatttcattacactactcagaatggtgaataatcgaaaacttacaaattgttttgggaattttccatttaatattttcagactacagttgaccatgagtaactgaaactgcagaaagcgaaactgaaaataagggcgaactactgtaaactgattcagagtatacaaaaaaatgatggaaagcatcccaactcatttaaaggtgtaagcataatcctgaaactaaaaccacaactttacagcagagttcataaactcaaggcctctggactgaatctggcctgaacaagtattttgtttggcctgtacaaaattttaaagattgagataatttagatttgggagatttaacataaaattagcaatttccagctctatacagaaaaaggtcagatctaataaccctgggctccattcttacacggcaaaaacagcctggagctgagtggcctctgctcccaggctgccatgttgttgcacaatttgtgtgtgtgtgttggggggggcagggggagggggcggccctgaatgcttatgggttacagtgtaagtgtgcctggccctattgtcaacagaatcgccatttgtcaccatttctaccactccttatcacttcctaattctggaccagatgtaggttgccacttgtgcttgggctgttatttttctcaacgtaaatatttctacctctatcaaaaaaaataaaagaaaagaaattgatggtttcatgattttgccttctaccaagtgtatttggctgattcaatttcctgcctggcttctgttggcactgagtttgtgcccctgctttacgatttctatctttggtttccccacatcagatgacagaaatacccacttatattctcttttatttgcatagttttatgccttaaatttaaatgtttaatccatcttgaatttatggcatggaaaaaagacctaaaatggtttttccaatttagtcaactattccaacagcatttataaaattctttctccactgtcttaaagttctaccttttttggagtcactttttttcttttttttttttgagacagagtctcgctctgtctccaggctggagtgcagtggcaccatctcggctgactgcaacctccacctcccaggttcaatcaatactcctgcctcagcctcccgagtagctgggactacaggcatgcaccatcatgcccagctaattttttaatatttttacatacatacattacatatgaattagcataccactaattcatatatgctagggcaatattttcaacactactcttcctctttaatattttcaaggctattcttacataatctttttttcagctaaaccagtctttaaaatattctattgggccgggcacactaactcacgcctgtaatcccagcacttggggaggcagagatgggcagatcacttgagctcaggagttcaagatcagcctggacaacaggtaaaaccccgtctctacgaaaaatataaaaattagctgggtatggtggtgcatgcctatggtcccagcgacttagtagggtgaggtgggaggatcacctgagcccaggagcagtgagcgctaatcgcaccactgcactccagcctgggcaacagggtgagacctcgtctctctctctctctctctctctctctctctcaataaataaataaataaatgctattgtgaagttaattgaaagtacattaaatttatagcttattttggggagaatgggtcttgctatggtttgagtatctgtcccctcccaaactcctcttgaaacctaataacaattttaacagtattaagaggtagagggttgggcgcagtggctcatgtctgtaatcccagcactttgggaggccgaggcgggcagatcatgaggtcaggagttcgaaagcagcctggccaacatggtgaaaccctgtctctactaaagatacaaaaaattagccgggcctggtggtgcgtgcctgtaatcccagctactcgggaggttgaggcaggagaatcgcctgaacccaggaggtggaggttgcagtgagccgagatcgtgccattttgcactctagcctaggcaacagggtgagactctgtctcaaaaaaaaaaaaaaaaaagaggtgggagcctgctgcagtggctcacacctataatcccagcactttgggaggccaaggtgggaggatcccttgagcccaagagtccctgactagcctgggcaacatagggagaccctgtctctacaaaattaaaaaaatcagtagccaggtgtggcgacacatgcctgtggtcccagctacttgggatgttgaggtggaaggactgcttaggcccgggaagtcaaggctgcaatgagctgtgattgtgccaatgtattccatccaccctacatgacagagtgagaccctgtctctacaaacaaagtgagacctttaataggtgattaggctatgagggatctatcttcatgaatggattaatgccattaccaaggaagtgggttccttataaaaggaagagttcagaccccttttgtgtttgtttctctctgtctttccccttctgcaatgtgatgccctccaccatgttatgatgcagcaggtaccttgccagatgccagtatcttgatcttgaacttcttggcttctagaactgtgagaaacaaattcctgttcattataaatttctcagtctgtagtattctattatggcagcacaaatggactaagggaggtctttacatccaggcacgtggtatgtcttttcatttattctagttttattttactactttcagtagatttgtatagcttattcatacaggttttggacttttctttagtttatccctagttaccatatatatatttgcctatacgtattataaatggggtcttttttcctttatattttttaaactggttatttctagcatttaaaaaagctacttctttgtatatttattttgcagcctaacctagaaaaaattttagtgcaggtgcaactaactgccatataaataaatcttaataaagcacccacagaatacccagcttggagcagtgagcactccaagaaaaactagctgcaaaatatacactaagacaactaaacacagtgactttctgtgtaatctttttatttatatatcacctaaaataattataaaaatacatatcagccaggcgtcgtggctcacacctgtaatcccagcactttgggaggccgaggcgggcagatcacctgaggtcagatgtttgagaccagcctagccaacatggtgaaaccctatctctattaaaaatacaaaaattagctgggcatggtgatgtgcacctgtagtcccaactacttgggaggctgaggcaggagaatcacttgaacccaggaggtggaggctgcagtgagccgagatcgcgccactgcactccagcctgggtgacagagtgagacttggtctcaaaaaaaaaaaaaaaaaaaaaaaaacaagtgaaaaagtctgggcacagtggctcatgccagtaatcccagtgctttgggaggctagggtaggaggacaacttgagcctgggagtttgaaaccaggctgagcaatatagcaatacccaggcaaggtggggtacacctgtagtcctagctactcaggaggctgaggtgggaagactgcttgagcccaggaattggagtctgcggtgagctatgaccagatcataccactgcactccagtttcggtaacagagctagaccctgtctcttaaaaaaaaaaaagaaaagaaaagaaagcttttggcaaattagaagtaattcacttcttcattgagtacctttatggcctcttgtgagcttcggttatcaagattttcccaggacctagtcatccctggcaaggctgcatttctggatatttgaggaccagacactgtaatgcagcacctccggtggatatcctgcactgagaggttttgagcctcagcacctaagctggccctcctgaatgataccactgcctcacttcctttaaggtgctctagtctctacaacttatatttcaaaggtctccctctgtattcccagtcttttatgatattttataatctgtaaacttaattatttgaaatagacatcagggttccaccagggaaaaagagatcagggttcaaaaatcttttatcttcaaaaggcagacagctaggcaagaaatggctggtgttccgtaaacatttttctaagagtatcttctctctattgtttgagtttaaagtttgaggttatccttattttttattcttcagaggataactcttctttctttcaagctttttttttttctttcaaatctcagtatacaccagaagacttctttccagttttaagaaactgacaagtaggtatttgggtattttgtctttaagtaccaaatctggaaataagtaactccgaaacctctcagtctgtaggcaaaagtctatttttctacagtaacttctttaatgtttccttttctgaggcttcctccgatttacactccttcccattatttaaagggcagttgggcgggggaacaacaacaaccacaacaacaaccacctaggtttattggaattgccataatcaatttgtctattccatctatgttttaatcgggatctttccatttagccttaattttactgactacctcattatttcgattccattttttcatcaaaggatgttgtaattttaaaatatgtttcatcgcaatgttttagctttttttcatctaattctaaccagatgtatatatttgtttgagaaagggtctcactatgttgccttggctggacttgaactcctgagcaccagcaatcctcctgcttcagcctccagagtagctgggcttatagatgtgtggcaccatgcctcacatttaatctacttattttttttccctgatcagttccttttaatagcctttgtgttttttatcctttccagccctgttactgacaattccaatttcttcacattttggattttttctgtttcttctgctaccattgttttctctgggtttgtgcacagcttttctctttgctgctgttccacagttctaaaatccagcctgaggtgctatctttgtttaccgtaattgaagtttgtctacttgaatattttttaaaaattcagatgtttgttattttggtgagtctatttttactctgccatattcctagtaatttttttttttttttttttggtgagatgcagtttcggtcttgttgcccaggctggagtgcaatggcacgatcttggctcaccccaacctcagcctcctgggttcaagcgaattctcctacctccgcctcctgggttcaagcgaattctcctacctccgcctcccgagtagctgagattattgacatgtgccaccacgcccggctaattttgtatttttaatagagatggggtttctcctagtagaggtctggtttctccttgaagacagtttgaggctggtcttgaactcctgacctcaggccttggcttcccaaagtgctgggattacaagcgtgagccaccatgcctggccattttctctatttttatgtaatgatgaaatctattttcaatgtaaatcattctattagatctttatgagacttcactttgagggcaaagaagaatttgacgtctcatgttccctttgttttttaactgttcttttcacaggtatggatttaattcttttctttcttccttccctttcctccttccttccttttcctccttgcctccttcctcccttcctccctccctcctcactctgtcgcttggattgggtgcagtagtgcaatcatacctcactgcagcctcgacctcctgagctcaagggatcctcctgcctcagcttcccgagtggctgggactacaggcacatgtcaccatactcagctattttttgaatttattttttgtagagatggggtttaaccatgttgcccaggttggtcttgaactcctggcctcaagtgatcccccctgccttggcctcccaaagtgttgggatcagaggcatgagccaccatgcccagcgcctttcttcttctgtttttgtgccttagattcagtagaactcaaattccctcctgacatctatatcccaggcatgagtgtgcatgcagtataattttttttttttttttgagacagagtctcactttgtcacccaggctagagtgcagtggcacaatctaggctcactgcagccttggcctctcgggttcaagcaaattttcctgccttagcctcccaagtagctgggactacaggcacgtgccaccatgcccagctaatttttttgcatttttagtagagatggggtttcgccatgttagccaggatggtcttgatctcctgatctcgtgatccgcccaccttggccttttttttcttttttttaaaagaggcagagtcttgctgcatcacccaagctggattgcagtagcatgatcatagctcactgcagcctcaaactcctagggtcaagggatcctcttaccctggcttcctaaagcattgggattacaggcgtaagccacaactcccagccctatacttttacaaagaatctgctaatcaacatttaactattgacttctacatgattcattgttttttgattaattgatggcagcactcttaggaatatgggttagggggaaacaacacagagtgatgcagagacagaaggaggatgaaatagaagacaagttataaaggaagaaaatactctcaggttgaaatttacatcataattacacaaaggcagtgtgaaaagaaatacgaagcaatgagcggttcccatctcaacatgaaataaactctaggggtaataccataactacttaattttagaaaaaagctgatttagttcccaagaaaacatgtttttttctgctgtgaggaaaatcaaaacgcaacaggacagcaatacctcattttggcactcaaaactatcctctaattatctgcagatgtttaattttaaatctctctcaagtttgatgaatgggcctgtgagcctctttactcagagccaatttttagtctacattaaagactcattagctcctggttctattaggtcagcataacagatatctgcagagcacaaaacaaatatgattcttaaaaatttggtgtttccatgaaaagaatcccataatagaggattcgatgagccacatgaacagaggttctgagattctcataatatttaaagagctcagcctcttctgtgattgtactggactcttggaaggggatgagtgggaacataatttaaagagttttcactgcaggcagtaatttacagtaaactagagagtattcactcttaagaggctggctagatatatgagaaaaacacaagcaagcataggtagagatcatgtaaattagggaaattaaacaaaaattttccagatgtataggtaactaatcacatatgtaagcatcttcaccttcagcagcagcagcagcttaaaataaaaaaaaaaaattttttttggtatttcaggctgggcgtggtcgctcatgcctataatcccagcattttgagaggccaaggtgagaggacagcttaggcccacgagttcaagaccagactggacaacatggcaagactccgtctctacaaaaaaatttaaaaattagccaggtgtgatgatatgcacctgtgatcccagatactcaggaggctgaggtgagaaggttgcttgagcccaggaagtcaatgctgcagtgagccgtgatcatgccactgcactccagcctgggtgacagagaatgatcttgtctcaaaaaaataaataaataaaataaaaaataaaaaaaattggtgtgtccagtaactggaataaacagcacttatcattaatgttaacctacttattcactggaattaatatagagatggctcatgaaaagaaactcttttttttttttttttttttgagacatggtcttgctctgtagcccaggttggaatgcagaggtgcaatcacagatcactgcagcctcaacctcctgggctcaagcaatccttctgccttagcctccccaggagctgcaactataggcatggaccatgaagtccagctaatttttttatttttatagagatggggtcttgctattttgcccaggctggtctggaattcttgagctcaagggattctcctgctttgacctcagaaagtgctgggattacaagcgtgagccacagcaccaggcccatatgaaattttttgaaaaatattttggataatagattatgttatttgaaaatggctgtatcttttttaatccttcaagaaaaccaacctgattgtaaagaagaaattaaaatgattatttgcaggtgacggtaaaataaaaaagaatcttattaaaagaacaaaaagaatacttactaataaatacatgcaatctgtattaagaaaatataaaagacacaaaagaagatgtgaatgactaaaataccctcttcttggttgtaaagacgctaaatattataaagatgtcaattttccttaaatctatcaatttaatgcagatacaattcaaaaaaactgacagggtttgtcttttctgagaggacaagagtggtaaaaaggctaattctagtttaaaagtaaaaatgaaaatgaaagcacagccagaaatactctaaaaaagaaaaacctggccgggcacggtggctcacgcctgtaatcccagcactttaggaggccgaggcaggcggatcacgaggtcaggagatcaagaccatcctggctaacatggtgaaaccctgtctctactaaaaatacaaaaaattagccaggcgtggtggcgggcgcctgtagtcccaggtactcgggaggctgaggcaggagaatggcgtgaaccctggaggcggagcttgcagtgagccaagattgcaccactgcactccagcctgggtgacagagcaagactccatctcaaaaaaaaaaaataaaaaaagaaaaacctgtgctgctgacacttgaattgacagatgaacaggacagaatagaaatacgacagttgttgtttaccaaatattttcagctttccatcttccttctgcacacatgtatgactgtattttcctgctgttttgttgtgggtagagtcatgtgactaaaacttgtcagcgagctgtgaagggaactgatgtatatctctttcaggctgaacattttactgatggtgtgagagtctccaggcccctctttcccttagtcaggaaagctggtaatgttcaagatggtggcaactccattagtttctgagtgagaagacacggagtagagctctcagccaactcttgatgaacatgtaccaaaaggaaggaaaattcttgttataagccattaagattttgaggttgtttgttaccacaacataacctagcctacgctggcagatacaagaaagttaaagaatagcccaaattaatataggaatcataaagctgacatttcccattagagagaaagagagagagatggattattcacaaatgatattgggacaattaggtagccagttgagaaaaaaaattaagatagccttattctttgtattaaaatatatctgagctgtacctaaggtttaaatataaaaaatgaaattatgaaaatattaaaatatatcaaagaattttaaaaataatctcaaaatggggaaggcctttctaagtaaaactcagaaacacccccaaaaaaaatccacagaaactttctgcttgggggaaaaaagtactctcacacattatcagtggaattgtgagtagaattattggcttccacaagagcaactcagcaaaattatacatgcacttacctattgacccagcaattccacatttaggaatttatctttcagatgtacttgcatgcatactcaaagacacatttgtaccaggctcttcacacaaacttgtttataaaagcaaaaggttggaagcaacctaaatatgtaattggttaagtcatagaatatcatcacaatctaatgttttacagttgttaaagaatgataccaggtcagtcatggtggctcacacctgtaatcccagcactttgggaggccaaggtgggaggactgcttaaggccaggagttagagaccagcctgggccaacacagttaaaaaaataatatatatatacacacacacatatatatattttttaattagctgggcatggtggcacatgcttttagtcctagctactcaggaggctgaggttagaggatcatctgtgacccaaggttcgagactacagcaagctatgatcacatcactgcatcccagccaagatgacagagcaagatcctgtctctaaaaattaaaaaaaaaaatgtagatttggcacagttccatgataacattgctaagtaaaaaacaaaacaaaacaaaaaaacaacacacaggacagtgcatgtggcatatcacctctgatataaaaagaaaagagaagctagctttgtatttgtctaaaaaggtctctagaaaaatatataaaaaactggtatcagtgattgagcctctgacagggctggaaggagaatgacttcactgaatacctgtttataatatctttagtattttgctgctaggatatgttaatgttacctattaaagagaataaaaaatttaattgtaaatggaattggaagaagctatttttatttttatttattttttaaacaacttttttttttttttttttttttgagatggagtctcgctctgccgcccaggctggaatgcagtggtgccatcttggcttactgcaacctccgcctacctggttcaagtgattctcctgcctcagcttcccaagcagcttgggactacaggcatgtgccaccatgcccagctaattttttgtatttttagtagagataggatttcaccgtgttagccaggatggtctcgatctcctaacctcatgatccgcctgcctaagtctcccaaagtacagggattacaggcgtgagccactgctccatgccttaagaagctatttttaaagaaaattgtcccagttgtttgtaaagattcacagaaatttaaaaaccttgattcttatttaaaagacttagttgaaaatcctggctttttctggataaatgtagtgaggaaaaattatcacaaggataattagatacttcacaaatatcctatagctatctgtcttaaatcagcatttgcttagataaggtaatcatttaatgatcattttaattatacatttataattatatataaattgtttcttctcagttgtctaatatctctcgaatgacagtaaaataacatgaataatgcacattattgtcttaatctaatgagattgccgtttcatgaatagaatatgtgtggctatatacacacacacacgcacacacacacacacacacacggaatttccatctatacttgctaatacactactttttactgagttggaaaatgtactccttgagcgcagaattacattgattgtaatcctctaatactacattgattacatccagtgtagcaatacaatactccttgaggataacagagatcttactcattactttacccactcaataacagttggctttttaaagtatttctctttattcaaaggtaagcactactgatgagcagctctgacttcactaggaaatcttccatgtctttgatctcttttggttttggcattagactgacatttttggagaaaactctgattgagctatgtgaggctactttagtaaagcagttatatcaacatacaggaagaataataattacaatctggttgaaaccacactgcagcactttaccaggcagaatcagagcatgaagccacatgaaatacggacttagaataaactttagatgtaagtttgtaacacagattacaaacttggatgtaaaacaagaaatataaaatttcatcacaggtacctggtagcacttcagtattttgtcttttttttttttgctgttgttcatttgtacacttcagtattttgaataagctccttgttttcaattagttatagaataatttacttctgcaaacaaactacaaggttgtaagtctcgtacaattggtagactggacattgtatctctctagggtctcccttgaaaatagctccatggattccattaatgactttggctttaaatttcatggaaactgacagatttgggattttcatatttgaaattctcttcctagtgtcataatttccaaagcaaaaaggctagacattggcttaaataagtcaaaataatatgcaagtaaatctttgtattaaatagactacagtgttcagcttactactttgtttctttgtcatattggtttaggttcaaatggattgttaataataaaaatgttataagcacaattttaaatatatcatctatggattttgattacatccaatgtagcaatacaattaatctaggaaaaattacctaaaaagagttagcctgatgtataatccctgaaactggagaaccttttttttccaagtgattaatttggatattaatcaaaatgaacattttacattgtgctttagagtttgtgactaggttgtatacatattatttaatccttataatcactatgggatagatattatgctccccagtattcagatgaaaaactgagactcagaaaagtcaggctagctgcccaaactgaaaccactagtgagtggtagaagaaactgaaaactcacatctttttttttttgaggcagagtctcactctactacccaggctggagtacagtggcccgatctcagctcactgcaacctccacctcccacattcaagtgattttcctgcctcagcctcccgagtagctggattacaggagcccgtcaccacacccagctaagttttgtatttttagtagagacagggtttcaccatgttggccaggctggtctcaaactcctgacctcaagtgatctgcccacttcagcctcccaaagtgctgggattacaggcgtgagccaccactcctggccacatatctgaaatcaaacctcttactcttcccatgagaacctgctgccttccatggaccttgataagcctggactgcactggtagggttagaatggatacacaagtaaaaacaatttccgtggttggttcctgtgggcagttagtatgctgatgcatcttggatcatcttcactgccttagagggcctccagaaaggcccacaccataatttctaaataactggcaacaaggtatatatttttaaactttttattttgaaataattttcgatttatagaaaagttgcaagagttcccaaatacccttcgcctaacttccccaaatgttaaaatcttacctaaggatagcagaaagacaggaaatcaacagatataatcctattaactaaaatacagactttatgcaattttcaccagctttcccactaatattctttttctgttctaggatcccacattgcattaattgtatctctttagtctcctccaatctgtgacaaagaactgtgtcttttaaattaaaattaatcaatgttcattttattctgaaaatgtcatggcacttctcgaaacagtattgaatattacaaacctcctttgggaattgctaggtctatgagataatcaagaaaacatcctgaaataaagagccagagtggccctaaagatagaaaaaagaaaatcactctttaaataaaggtaggaattggctgtgacaatctgaatgtatcagttgtatttgtgacacctgtccatcaacagtcagttataactccccggaaaagcacagggttaaaacacctacctctggagtataacagatagaaatcaatacaactctgtttaatggagcagtcattaaagagttatttcatttgttttaaattaaaggagttgagtttgttcattctacagacagggtaaattaataactaaattcaagtatacaaaggtgattagaaggcactaaattttctctacatagtgatctccttttctaattggtagcataaagttgctgaactgtcagtgatcctaattcaaaaccaaacccctgggaaaggtgacgagtctttggaccctgttgaagctactctgggagaagtgtcaacagggttctctataaacctcgacagctcacttcttattcttgaggattctagattgaacacattaattccaggactttaatggtgaattcttagttacccaaaaaggtattagaattcctacaggagtttagaatccctgaagacaaaagactagaatgcataaactgcacgtactaaaagtgaaataaagaagtttagtaaaccacaagcacttctagagtggtaaaacagcaacaagctaacaaatgaaaaatggaagattctttcattgtacagccttaaaagtgagagaaaacaatgtcactgatagtttagcaattcatagccaggaactgagagcaaattagagaaagctgcatggcactaagtgggttccatgaaagatggcatagcagaggcagtaaccttacagagttgagtttagccacgccccaccacggggacttgtaggcaagtctcaatgtcccatctataatatagggagagttacccacatccacctctggggtgtgcctggcatatagtgagtgctcatcattcccatcaggtctctttttgttctctggtgtgaggctggcattggggttaggaatcatttgggcctgagccacatctccctgggccactctgggttagatctacatctttgagcctgaaccacaagtggactcctttctgaagtgacaggggcagggtacagaatactgagaaacagacattagtttagccacatttcttcaacaacaatttccagatagccaacctgtataaattaaaaccctatctgtttttagatctaaattttgtagaaggaaaattctacagccacaaaacagcatctaagatgttcatgactaattcagcattcttcaaatggttatgaatcagcaaagtgtgcaggctgcctggtagtttgacactggtgataattaccttgcatttctaaaaattacagtcctaagcactgcctggaagtctcccctttgtttactaggatcacctcgttcttttaagaaagatatgtgaagacttcatctttaaaatgattttaggcagccaatggaacaactgagacgatggggcagatcaaatgttatttcaatatttggggggtgaatttggttctgcttttttttttcaaaaatgctgaaaaatcacaatcatttcagaacagtgaataatcctctaaatgagtcttaaagaatcaagacttgcaatttcattagccctgaaagctctctttcctttataaaaatgttttacaagactactactaatcttcatcacacaaagcgctattattctggttttatagatggatatattgaagactatacaagtttgtaatttttctcttccttcaagatcaggaatgaatgatgagtgcctcaggtcatatgaagctgtacaagatatatgctcccagtaaggtcacagtacgtcaagagttgggtctattctctacttcatcattttccccaggggctcacagactcactggaaaaatttacacttaaccaaactcacaagaggttggctcataaaccataatatcaactccaaaattcaaaccagaaaatatatttagcaggtttcttttggaagattctctgcactaacacaattacagaaaagagaatgacatattctttttaaaatatatatattttgtagagatcggatcttgtatattagtatattctccgaatggacatttccatttagagaatcagtatcggctacgagaaacagaagcctccttctctagaggaagctagagaatggtagctgctctttggttttccttttgtttatcattaatgagtctgtatcagagactgatggttttctgtcctaccccaccctcaatatctgttctccctttcttccacttaattagaatttttggttgggcatgtgactacacttcctagccttccttgcagctgtgcacggccatatgtctcagttctggccaatgtaactgatgcacatgaagttgtctgggaatcatgcttaacagaatactgacaggtgccttctatcttctgcttcatccctttctccatcctgtacctgcaataggtgctaccattttcctcaataaaaatgaggtttacacccaagaggagggcagagtggtaagagagaactaggagtaagtggtaaaatgtccctgatgccatgaagctccattccagatctgtaccaacttttacatgaataagaaatacattttaggctgggcgtggtggctcacgcctgtaatcccagcactttgagaggccgaggcaggcggatcacgaggtcaggggatcgagaccatcctggctaacacggtgaaaccccattctctactaaaaaaaaaaatacaaaaattagccaggcgtggtggtgggtgcctgtagtcccagctactcgggaggctgaggcaggagagttgcttgaacccaggtggcagaggttgcagtgagccgagatcgcgccactgcactccagcctgggcaaccgacagagcaagactccatctcaaaaaaaaaaaaaaaaaaaaaagaaatacattttaatcttattttaagccacttgtttcaggttttctgtcactcacagctgaaaccttccaatatactgatgttctaggtaggtcagtactattttaaattattttgtattcacagaccatttagaataacagatcatggattctaattctaggtcagaaaaatacaggattttttttttttttgaggcagggtcttgttctgttgcccaggttggagtgcaatggtgtgatcatggctcactgtcgcctcaaactcccatgcccagacaatcctccctcttcagcctccagagtagctcgaaccacagacatgtgctaccacgcccagctaattattttttttttccacagatggggtttccctatgtttcccaggctgctctcaaacccctgggctcaagtgatcttcctgctttggcatcccaaagtgttggggctacggatgtaagccactgcacctggacagaaaaatatggcttttgctaagactatagatacttatgacactacattaggcaactaattagaatacaggaaatctaacattacaatgtaatctttttgatatgatgtaagaaataatggggaccatcggcaatacatttgccaattattttcacagaactacattcagcactaattaagtatcgcagtccaaatgccccacttttcagaggaagagattgaggcacacagacgctgggttttcaaagctaaaaggctggcttttatttttcaaactacatccaaaaatttgagggggaatatgctctaagggttgcacttctaagtatcctgtccccaacagctcatttatactaatatgcaataattggttatcctgaaataaaatacttagcattcagcccatcaagctcacataagaataaaaaatgtggccaggcgtggtggctcaggcttgtaatcccagcactttgggaggccaaggcgggcggatcacaaggtcaggagttcgagagcaacctgaccaacaaggtgaaaccccgtctctactaaaaatacaaaaattaggctgggcgttgtggctcacgcctgtaatcccagcactttgggaggccaaggtgggtggatcacctgaggtcacgagtttgagaccagcctgaccagtatggtgaaaccccgtctctactaaaaatacaaaaattagccaggcatggtgggacatgcccgtagtcccagctacttgggaggctgaggctggagaatcacttgaacccgagaggtggaggttgcagtgagccgagattgcaacactgcacgccagcctgggcaacagagcgagactctatctcaaaaaaaaaaaaaaaaaaaaaaaaaaaaaaaattagccgggcgtggtggcgtgtgcctgtaatcccagctactcaggagtctaaggcaggagaattgcttgaacccaggaggcggtggttgcagtgagccaagatcacgccattgtactctagcctgggtgacagagcgagattccgtctcaaaaaataaaattaaattaaaaaaaataaataatgtaacacgtgactgggtgtggtggctcacacctgtaatcccaggactttgggggtcaaggcgggtggatcatctgaggtcaggaggtcaagaccagcatggtcatcatggcaaaaccccatctctactaaaaatacaaaaattagccgggcgtggtggtgtgcacctgtaaccccagctactcaggaggctgaggcagaagaaccgtttgaacccgcaaggtgggggttgcagtgagccaagatcaggccactgcactcaggcctgggtgacagagcaagactctgtctcaaaaaacaaaacaaaacaaaaaacaaaaatgtagcatgtaaccatagatatcatataagaatgtctgagttatgcaggatagtcagctggaaaattagttacaagagaacagcaaataaaagtgagagtgttgcaacagttttagttacaacagtcctatagagttgcacattattatcctttgtactgaaagattcactaacaaccatgacattattcatatatacaaatgcagctaaaaggaatgatgggacatgaatcttttccacattctacactagaacaccattcttaggtctatagctacagtaaccgtttatagggcttttctcgtcatttgtgactgaagactcatgaaacactagtcaattttctttgtttaaaaaaagtcacggccgggtgcagtggctcacgcctgtaattccagcacattgggaggccgaggcgggcggatcagctgaggtcaggagtttgagaccagcatggccaacatggagaaaccccatctctaccaaaaatacaaaattagctgggcgtggtggcgcatgcctgtaatcccagctactcaggaggctgaggcaggagaatcacttgaacccaggaggcggaggttgcagtgagccgagatcatgccattgtactcctgcatgggcaacgagaggcgaaactctgtctcaaaacaaaacaaaacaaacaaacaaacaaaaaaagtcacttcatcttttcttccttcaggataagtcagtatatctctaagagccttaagataaaaaagaacatggatgaaccttgaaaacatcatattaagtgaaaaaagccagtcataaaggatacatttttaaaatcctatttatataagaggcccagaataagcaaatctatagaaatagaaagtagattggtagttgcttagagcaagggaagggggaggagcggggagaatgaggggactgaggagcgaaggccattctttttggaataatgataactaaaatgttctaaaattgattgtggtgatagacagaaaactctaatattctaaaagccactgaattgtacactttgagcaaactatatgggatataaattatgtctcaataaagctgttaaaaaaaggcaaaagagaattgcctaaaacaatcatcaaaaacggtattttaatggccagatgtggtggctcaagcctgtgatcccagcactttgggaggccgaggtgggtgggtcacctgaggtcaggagtttgaaaccagcctggccaacatggtgaaaccctgtctctactaaagatacaaaaaattagccaggtgtggtggcgcatgcctgtaatcccagctacttgggaggctgaggcaggaaaattgcttgaacctgggaggtggaggctgcagtgagctgagatgaagccattgcactccagcctgggcaacaagagtgaaactctgtctcaaaaaaaaaaattatattaatgcatatataatctccttaaaagttaagaactatgtagtacagttaggcagttacaatttttacatcatctgacatccaccgaaatggaacttctgaccagccacagttcagcagccaggctaagctggctgcataactgaactcatatttataaaaagaggggaactgagatgtagcaaaaattgtttgttgttattccttgcttaataacaataatcattaggagagctaaggagataaactacactcacaataactggaatattcaatgataattatccccattttgaggctaaatagtgattcaccaaggccaaataggtaacaaataatagggtcaaaacttacttgaatcccacacgcttttctgtatatcaccctgcttcttttttacctttatggaaatttacttggaacttactatgcaaaaatatatgtggccaggcgcagtggctcatgcctgtaatcctagcactttgggaggccgaggcaggcaggttacctgagctcaggagttcgagaccagcctgggcaacacagtgaaaccctgtctctactaaaatacaaaaaattagccgggcgtggtggcgtgcacctgtagtcccagctacttgggagtctgaggcaggataattgcttgaacccgggaggcagaggttgcagcgagctgagatcatgccactgcactccagcccaggtgacagagtgagactccatctcaaaaacaaacaaacaaacaaaaaacctcatgaagagccagtttttttcaaattacaggaacttttaagtcagatcatatgtaaaatgcctgaaaaaatattaaaatgatatcagatctaataaactcagaagtgaactaaaacaataaaatgtagtggggttattcatcaagtgcttcttaccacaaatgtagctttctgtaaattcaggctgaatatgaggcacataaaatagttattgatatgaataaaggtaagattgtaaatccaaaacacatattggatgaaataattgaaatattacttaaaagacaaaaatcacccttatttctggtagaggaaagaaagcagaatgtgtaagatttgtggtcaccaaagaacaaagtttcaggccagcatggtgaatcacgcccgtagcccagcactttggcaggccaaggtggaaggatcgcttgaacctaggagttcaagaccagcctaggcaagagagtaagacctcatctctataaaacttaaaaaaaattaataaataaacagctgggcatggtgacatgtgcctgtagtcccagctactcagaaggctgaggtggagagattgcttgagcctggaagttgaggctgtggtaagctaagattgcaccactgcactctagcctgggcgacagtgagaccctgcctcttaaaaaaacaaacaaaaaaaaacagggccgggcgcggtggctgacacccataatcccaccactttgggaggccgaggcaggcagatcaggaggtcaggagatcgagactagcctgggccacatcatgaaaccccatctctaccaaaaatacaaaaattagccgggcgtggtggctcatgcctgtaatcccagcactttgggaggccgaggtgggtggatcacgaggtcaggagatcgagaccatcttggctaacacagtgaaaccccgtctctactaaaaatataaaaaaattagcccggcgtggtggtgggcgcctgtagtcccagctactctggaggctgaggcaggagaatggcgtgaacccaggaggcggagcttgcagtgagccaagatggtgccactgcactccagcctgggcaacagagcaagactccgtctcaaaaacaaacaaaaaacaaaaaaacaaaacaaaacaaaacctcagcaaagaaaggtaaaagataaaggataaatgaaacaaatgtggcaaaaccttgttaattgttgaatcccactgataggcacagggccataataaaaaaatttaaaagaagaacctcactagcagaaaagtctgaaaaaatagtgtaggtaagtctattaagtaatattaatctcaggtagaaaacaaaaggatcaatgaaaaaagtcatggcagttgattatttagaaacagaataaattatatggaaaatatcattttttcctcagatatgaccagacagctatataatatagtttcctgaagtaggttatttcactggaaatcaacagtagataaaatacagtttttatataatacatttttaaaaaaaactttaggaatgcagctgtccatttactccccttagaactgtgtcacgcttttatataattctggtgttctaaatggatggtggtagtgaattgaaatagagaaaatgaagacacagaaaacagaagtcacagctgcattctgaactgaatgctttgaatttttctttttcttttcttttttcttttctgagacagtctcactctgtcacccaagctggggtgcagtggcgcgatctcagaacactgcaacctctgccgcccgggttcaagtgattctcctgcctcagccttctgagtagctgggattataggcgcctgccacggcgcccggctaatttttttgtatttttgtagagacagggtttcaccatctgggacaggctggtcttgaactcctgatctcgtgatctacccacctcggcctaccaaagtgctgggattacaggcgtgaaccaccacgcccggcccagaatttttctttttgtgtaatcattttctaagaatccagggcctccttcacatcccttctgaaatagtattttaacttttaatatgcaacatttacaatatattccacacacagcgctgactaagtttctttggaggtcaattttcaaattatcttccaagcaattcaaagtaaacagaacagaaaatcaatagttttccagaaacatcttcaaagcataaaacatttcatttctaatagagcagtagttcttaactttttcttagggttatggaaccctctgaaaatctattttgaaagaaaatctacatatttctttcaaagggttttatcattgttttgaaggcccatgttagaaactcctttttttttttttttttttttttttttgagacagagtctcactctattgcccaggatggagtgcaatggcgtgatctcggctcactgcaacctctgcctcctgagttcaagagattctcctgactcagcctcccaagtagctgggattacaggcatgtgccaccacacctggctaatttttgtaatttttagtagagtcagggtttcgccatgttggacaggctggtctcaaactcctgacctcaagtgatctaccccacctcggccttccaaagtgttgggattacaggcgtgagccaccacgcctggccagaaactcttataatatagcattcttatggataagcaactctaaaccaagtacaaattcatcagctcaacactaaaggcctcccatgaattggcccggacttttcatcctcattctccactatttctctaaataccagactttagtcaaatgcattagttatcgttcctgaagatgactccctatcttttttcttgatacttccactatctgcacatcccaggctatccccaactatctcataaaattctgtccatccttcataatgtacctcaagcaatacaacttccatgaaacctgccttgaccccataaaccttcccctgaacttcaatcttctgtctttctatcttccaatatttttccacactttgtatcatggtctgctgaatacttgtctaatctcggattctgtgtgagacagtagtcaaagtaaaaattattaccaaggaaaaatcttactctcttgagtggattgaatggtggccctcaaaaagatatgtccatttcttaacacaaggaatcggtgaatgtgactttatttgaaccgactttatttaagaaaaaaaaaagggtctttgcagatataatttaaggatctggagatgagagcattttggattatctgaatggattctagatccaatggcaagtgtctttataagagagaaagagaagaccatatgaagacagaagcagagactagaatgtgtggaatcaccaaaacctggaggaggcaaggaaggattcccctctagagtctttggagggagcacagcaaccctgctgacaccttgattttggacttctacctccagaactgtgaaagaacaactttctgttgtttaaagccacgaagtttatagtaattgtgttacagcaatgttaagaaactaataaaccccctttgctccatctgattctgacaagtcatttttatttactgcagtagctctgcaggagcatcagaagagatttaaaaaatatagattctgccccctaccccaaatctcttcttattctcctgctattatctgcaaagatctctgcacttccattatcaatagccctccagaggtgccagtacaggataacatctgaatagtaaagagactgtattcttgtgaaaagttgataacatccactgtgacaggtggtgggctctagaggatgaaggcctaggttcaaaactggaccctgaacttgtaaacctgaacaggttacttctttgacatttagtttgtcatccataaacaactctttgaggattgctgtaagcagtaaataggcaatatatttaaagctactggcataaaagctttttagtgtaggttaaccaatatgaaagatgattttctgagtataatattgcccctggctattgatatactgttctgtgatttaagaaaaaaaaaatcttactacgccgaaaattccatctgccctgtttacagagataatcgacaagtttgagtaaaagcctttatttaattatagccatgcatgagatttccaacacatttctgaagaagttttgcaacttgtttcatgctgaagaaaatgaatgaaagcctacacctttgatttcccttcccacccatttcccacaaactacattaactcataatttgacgtttcattatctgtcaacttttttcattcagtccaagataaagagactatttagatataatatttaggttctatttcaaatttatatcactgagcataatttcacatgctcagatttgggaaggaacaataaagagatacaggtagctataatttttttttggtttgccaagatgaacttaataaacttaacagatactgcagcaccattcaatctgcacatttgaaaaaaaaattaaggcaacataaagcatactgatagacagcagtgaaactattaattttgagaattcaataaacactgtcatcaaatgaactgaatgctcattattcttacagtatgatatttgcacttattttgctgtcaattaaacaattatgatattaaatctgctaaaggaagtgaagaactgtatctgatacaagcacctgtctaatcgggaaaacataagtaccatcaaaatgagagacaagctaagactacatacataattaaccttctatagaatctatggtttatggctaggtgtggtggctcacatttgtaatccccgcactctaggaggctgaggcgggtagaacacctgaggtcaagaccagcctggccaacatggtgaaaccctgtctctactaaaaatacaaaaattagctgagtgtggtggcgcatgcctgtaatcctagctacttgggaggctgaggcagaagaatcgcttgaacccaggaggcagaggttgcggtgagcagaaagagcaccactgcactccagcctgggtgacagagcaagtctctgtctcaaaaaaaaaaaaaagtctatggtttacacaggagcaagctttacaacaagatggaaaaattttcctaattcaaatgatcaaaactttagaagatgacaacaaaaggaacgggcaaacctcactttaagaaaagttgacaaataaaaacaggaactttaaaagcaggtaacctggaagttacttacaatataaaaacattcactacagttcattgcaactttaatacacctaacagtagtgaatccataaaaattcaaattacattaaatttccagagcaaatttgtaacacgaggttcacttgtaacattatctaaatagcagtttcctttcccttgccactgcaggctttctccaactccctggggtactatggagggccagtgcaactctctggtatcagactatccttagggcacatggagggcccaggccagctttcccaagagtggccagccaaaagcaaggccactggccagctattcttgggccagctggcatggaacaaagtgtctggttcctacctccaaagcacaggaggctctgccagctggctttcaaaggactgcactagttggaatgctcacagttcctttcaaaccatctggcattcttttagaaccctcaatttacccaacactacattctgagatttgaattgctcagataattgaaggagtccccactacctacctaggtaagaaaagaaagaggcagagcaaacgctaagtcaattacttcaagaaacagtttctacaactaaaaactgctctcaagtttagcttgtatattttgtattttaaaatctaaaatattcccatgattattaagcaaactttcaaagtaaaaaccaagacaagtaataagagaataagctaaaacagactatttaacatgcagaaaagctgtaggaatcccttagggttagaagtacctgactctccctagcctgaacttctacagagcctgtctgtattttttatgtggtcctcagaatatacttcgtactgctacatatatttaccctcccagctagctagtagatgaaaagaacattgtcttatagctgtttcaaaagaaaaaaaaatctgttgatgatatattgggtgtttttaaagctccatttccagaaataagaaaacttaatgtggaataacatgaagaaagaacctcacctctgagaaaaccaaataaacaaagaacaggacttggcttgaaataaaaatattttatcaagtgatcaaaatgatttattggctgggcatggtggctcctgcctgtaatcctagcactttgggaggtgctggtagggtcacttgagcccaggagtttgagaccagcctgggcaacatagtgagaccctgtctctacaaaaaaaaaaaaaaaaaaagaaaaaaaattagcctggcatgctggtgtgtgcctgtggtcgcagctacttgggaggttgaggtgggaggattgtttgagccctggaggttaaggctgcagtgagttggagatcacaccactgcactgcagcctgggcgacagaacaagactctctctcttaaaaacaaacacacccccgccccccacaaaaccaagaacagctgaatcatcatattgatagcccatataccctaggagatatagtattttgaacaaaaatattatagagaccaagtcagagtcaaatattataaactggaggaggctataataattactattatttttcattgagtttactcccaagacgagtactgagtttcgtgttttacatattatctcatttggaacacaaaacaaacacatgaggtaggaactattattaaccacattacaaatgaagaaagagagaggttaggaaacctgctggaggtcacatagcaaaaagtgaaagagctggaattcaactccaagcagtctgatgccagagtccaggtgcaagactgcaaatatatatatatattatatatataatatatatattatacatgtaatatgtataatatatatattatatatataatatatatattatatatgtaatatgtataatatatatattatatataatatataatatgtataatatatataatatataatatataatatgtataatatataatataatataatatatatattatacatattatatattatatatatattatttatatatattatatatatatatatttttttttgagacagagtctcgctctgtcacccaggctggagtgcaatggcacaatcttggctcactgcaacctccacctcccaggttcaagcaattctctgtctcagcctcccgagtaactgggattacaggcacccgccaccacacccggctaatttgttgtatttttagtaagatggggtttcaccatcttggccaggctggtcttgaactcctgacctcatgatccacccgccttgacctcccaaagtgctgggattacaggcataagccaccatgcccggcccaagactgccaatattaagtcatacttatgaaagaatgaaatgtaacatagggcaaaatttgatcattaatatattcttcataattgtttcaattcttaagtgtagcaaaaaatggtgagtaattaaaaaacatggattctcttgttagaaatttttaaaaatcaaaagctattttaccaggtcagttgtgcctcttttgcccatgtactgagtagacacttgtgccacctgctgtcctaggggacagagtggtaaacaggacagatgaggtccttgccttcctggagctgaccttctattaggggtaagtcacacaaaaattattaaacaacagaatttcagagggtggtacgtactatagaggaggtagggaaggcacgtaaacttctcttttgagagacttaaccatgtaggtaaatagaaagggatagaggagggtcagggaaaagttgtttgctgaagcttattctgattttaaagatgggcaacgtcacggcatatgtgtatgctgacatggatagccccctggagagttgctgatgatgcaagagagagggcaaaaatgctaaagctgtgagatatgagggggcatgaggtatagaagatgtgaggaggaacacagtagaaaggggagcttgcctccgacaggagacagaaaacatgggtctaaggaaggcagatttctacatttggttggggggaagatgagtggtttctgtctgatatctcctaaaccctcaatgaactatgaggtcagcttatctgagtaggaggggtgggttgctgataagtttaaggagtggagagaagttatgaaatagtgataggcaaaaagatcttattaagattcaatggtagctttgccgggcagtgctgagtgtctacttcggatttttggtcatgaatctgaagttctcttgtaatatccagccacttgggtggtgtcatggaaaagccaaatgaatgataaagcagctataaatagaaaaaaaagggtttttaattttaaaatttttaaagagtaaacaaaggatgttttaaaaatatgtatccaaattagccaggcatggtggcgggcacctgtaatcccagcaactggggaggctgaggcaggagaatcgcttgaacctgggaggcagaggtcgaagtgagccgagatcacgccactgcactccagcctgggtgaaagagtgagaccctgtcacaaacaaacaaacaaacaaacaaacaaacaaacaaacaaacaaggccagatgcggtggctcatgcctgcaatcccagcactttgggaggctgaggtaggcagatcacgaggtcaggatttcgagaccagcctgaccaacatagtgaaaccccgtctccaccagaaatacaaaaattagctggacatggtggcgcacgcctgtagtcccagctactcgggaggctgaggcaggagaattgcttgaacccgggaagcagaggttgtggtgagccgagattgcaccactgtactccagcctaggtgacagagtgagactccatctcaaaataataataataatatgtatccatgagataaacacaaaaatactgacaatgttctgtgaagctgtgatttatgcagctccttttgcttccatcttctcatcacagaaattcttgcaaacaatatatttgtcacatttaataatgacatatttaatcatgaagctcaagttagtttctttttggtcatttctttttttgtcatttcctaaggtggatttttaaaaaatgcacctgacagccgtcatgttggttcatttcactgcttaaaagaaactctctctgatgtcaattgatattttcattgttgatttcatttaaaagtaaaaaaacttaatcccctctctcaatgaacacatacacatctacagtgcttaatctcaatgcctaaacagtggtcacaaggaaaatgggaagggagatgctggcctgatggcgctgggcacctagcagtgccaggtgcatgttcttgatcttgcagctgtgctcttaaaacacaatgctcaagatccaaaacgttcgggggagaattcctgtctgcacaggttcaagaggaggaaacaaagaccccactgcttgatggaggcacaaagaatagcatattgggtgagatggggggagtatgcacacacatacatatacagcctttttggaaaatacaatctaccccacaagcaaaagtaaagaaaaatatctattccaaggtacatcatgaaatgtcaggaacaccagggataaactgaagatcctaaaatctttcagagtgggaagaaaaagggaatgaggattaaaatgacattggacttctcaatagtgacactggaagctaatggaacaatgtcttcaaaacagtcacattaattttcaatccagattttaacaccaagctaaactaccattcaagagtgaaggtaaaatgaaggcatttccagacatgtaacttctgaattcaggaaggaatttcagattttgtatgtaccctttctcaggaagctactcaagaataaggaagacacagggtccaggaaatagaagacctaacacaggaggaaggcaaagggaattcccaagatgatgacaaagggaagtcccaggatgatggctatgcagtagtccagggagcaaacaattccagactggagtaggagagagggggctccagcaggaccatctcctggggaaaagatatgaaagtgagtgactacctgagaatattcaaagataatcagttttgtcatagagtttgaatgaattagtgactgatacaaagaaaactcagcaaatgaaaaccaaacaaacaaaagaggcaattatttaattcaggagcaacaaaagttgttcaagaagaaaacacagtaatagcaccctacgtggctcaactgtgaataacaggtacactgtcagtcatataaatcctgaataccgacctaactgtcaagtatgagtgggaaatggaaggatagttatgtgagacagttaagtcttcaacttccaaaatagaagtccacagagaatatccaaaagtgaagagctaagaaatagcagtataaacattaaaaatgaaataagtataaaggtaaataccaaaagaaaccagtaagagttgagagtggtttaactatataatatataagactgctgattttgattttttctcagtctcaacatggcaatttcatatgattcaagctaacacattgtaatagcattattactgatcttagaataaactcccatttaaaacaataaacaattattggccgggcgcggtggctcacacctataatcacagcactttgggaggctaaggcaggcagatggcttgaggccaggagctcaagaccagtctggccaacatggcaaaactccgtctctactaaaaatacaaaaaaaaattagccaggcgtggtggccagtgcctgtattcccagctattcgggaagctgaggcatgagaatcacttgaacctgggagacggaggctgcagtcagccgagatcacgccactgcactccagcctaggggacagggtgagactccatctcaaaaaaaaaaaacaacaaaacacccaaaaaacaaaaaagcaattattgatagagaatgctcaatggaaaaataaattactttttattatgagacattactgggaggataatagatcctagttaacaaagtgttaccatctatgctcttaccatcactaacataatattactattctaatgaataaatatttactattaaaacagcacttaacattattttatctattttaaggatctaaaagttagtttagattttttcttcaatcatcatactacagaatgctaaactatgggttggcaaatactttgattaacagaatgctgaataacaaggccaggctgtgtttaggttcctttgttgatattaaaaatagctaagtcactcttgcaaaattaaacttccatgaaattgcgatactgtgcaagcttatttcagtgataattccggttatgctactctgtttatctaagacttccccttacggtttgttttaaggagactcctaaaaaatgtcttatgcagtcaagacaggcagtttataaatgtactgggttacttcaacattagtgactttagttagtaaagctcttgtttttttttttctgcttcatttttccttcataaaagccttgttttaaattaacttatctgaattaaattaattgatattaagattttatttaaatcatgcattaaaaccaaaacatccccaattgaaaaatcaactttcattaatttttttttactcttacaaaaaagaatttgaacgtggtaagaattttactaagaataatgtatcctgaactgaccatggaaaatttccccttcaaattaaaagcaaatgttttaaacagagggaatatacataaacagatgctgtggaagactgcttagtttacatttcattttccactgaaaactactaggaattaaaatacatgtgatttttaaaaatattacagagaatcttaaagaaaacagaacccatacaattattcatatcatccaatataagcgcctcttaattttttaaaaccgctattttgaatccaaagatcataataaaaatagcttttttttcagacggagtttcgctcttgttgcccaggctggaatgcaatggcgcgatctaggctcactgcaacctccgcctccgggagttcaagcgattctcctgcctcagcctcccgagtagctggaattacaggcgctcgccaccatgcccggctaattttttgtatttttttagtagagacagggtttcaccatgttggccaggctggtctcaaacttctgacctctggtgatccacccacctcggccccccaaagtgctgggattacaggtgtgagccaccgcacccgacccataataaaaataccttggaggtgtgtttcttgtaaatgagtggctaatttcccaacaccctgtaaaagtatatgggtaaaaagaaactgaaaatcatcatgcaaccagagttaacaactatcttgcaaaattcatatcatttgttttaaaaccaaaatagcaaggaagagctggtgttatcccaatagcctctttttaattggtctacaacaactgcaactcttcataactttaccaacacaacaaagtcaggcaggcagtctgacagagtcaacgtttgtgggaacctacagcgcttccttctctctctggagatgaggacaatgaaaaaaggtgttctgttttccagtagtcctgtaagaggagccattgagctgggctgtacaaccagacaacagaacacaggaaaattcacatcaaagcaagggcgcatgccagggtaatatgcaataaaaccctctgccaaagcattaaggggaaaaaaaagcaaggaggtagagagaacctgctggactaccttctcattaacacagggaggcagaaagaaacaaaatctgcctgtattcaggagcggagaaaactgtgtcctagatatattggagtattcctatagacatgtttatgagcattcggacaaattatcaatgaactaaacccagaaagcagtgtcctgtacggtggagtattcctatgtagacagacatgagaatcttaccattaactaagcccaaaaaggcaaagtattctagaaacacagatatatgagaatttagatgcacatttccaatgaataaaacccactggttttacagtgagaaaaaactgtttgaaataacatcaggtaaagaattgggtaaaggtgtgatgaagttatatcccctccccttttcctcataccctttttgacaatctctgattctctcatttcatagatgtccctttcacttgaatgcgcacacacacacacacacacacacacacacacacacacatcattaggtctccagaaacaaaggagggtccttaattctccggcctgtggaaccacacacgccccctgcccacagatggtgactttcattaatgagtaagccgagggaagaggtctccaccccgaccactgccatgcacactgtgacaacggggcacgagacaagcgccacaaagaaaggggaggagtggacggggaccaggaaaacactgccacgccgcaccccccaaggcgcgcgcccaccgccaacgcgggggcagcgtcctcgccatcctcctcctagcctcccagctcatcccagccgcctcccacgcccggggacccgatgccagggcttgggcgagcaggacgtgcgggggcccacgcaccttccctccgtgatctccaggtgacagccccgctccgccctttgtgagggactcaccctccagtcccggggccgcgccggaccctcctccgcgtccctcctcagcctggagacaccgcctcacccctgcacaccgcgcccggccggccgaggcgccgggagagtgtgtgtgtgtgggaggctggcgcgggcccgcggtctcctcagcatcccgaacccggagcggctcggtcccccaaaccccagcccgggggcggcggccgcggcgctcccgccctcgctcgctcacttactcgggcgcgccggtggcagcggcagacgtgcgggaccgtcagcgccctgcggcgggcggcaggctgcgggcggcgagcgtccgtccggacagagcgcggcggaggtggcggcggctgactgcgcccggcggcccctcgcgaggggcgggcccgccgggggaggggcgggcgccgcgcctctcattcatgcagcgggggcggggtgagggacccggatgcccgggcagtttccccacccacctcggcggagggctcggcggcttcagagtctgcagtgcgcaggcgcggcgctccctggccaggcctggtgcggccctggccgctggctctgttcctggttagaactacgccagacaggccgggcgaggtggctcacgcctgtaatcccagcactttgggaggctgaggcgggcagatcacgaggtcaggagatcgagaccatcttggctaacgcgatgaaaccccgtctctactaaaaatacaaaaaattaaattagccgggtgtggtggcgggcgcctgtagtcccagctacttgggaggctgaggcaggagaatcgcctgaacctgggaggcggagcttgcagtgagccgagatcgtgccactgcacaccagcctgggcgacagagcgagactctgtctcaaaaaaaaaaaaaaaaaacaactactccagacagaccttctccatcgaccgtttagtatttttgcgtgccctacaagcatttttaaaagtgaaagcatggggccgggcgcagtggctcacgcctgtaatcccaacactttgggaggccaaggcgggtggatcacctgaggtcaggagttccagaccagcctgaccaacatagagaaactctgtctctactaaaaatacaaaattagctgggtgtggtggctcatgcctgtaatcccagctactcgggaggctaaggcaggaaaatctcttgaacccggggagcggaggttgcagtgagccaagatcgcaccattgcactccagcctgggtgacagagcaagactccgtctcacacacaaaaaaatgaaagattggaatgccacccctttcctagcatgcagattgacagtccccagagacacaagaatggtcacgtggtgcccattggtttgatggggagatggtatgcaccgcaccctcctccatctgcccctcctgctgcagcctctcagctgagtgctagaaccttggtgatggatgagacctagactctgcccagatagtggagagaggtgtgtgcaagaaacagtgcattcctttatttacatccactcctcaacctccggctcccattctacagggcaggcaataaattgacctccgattttgggaggctgagctcttcctgcaataccaaggcaaggatctggggagtcctctcttgtctttagcaggcagtgtattctgcagatactctcttgttcccatcgccttgtgtctgccactcctggggtacggaagtttctggagaggctaggagcctgcagagggaatggctgtgaagctccacagctgactgtgtgtgcgctgcagctcagagcttgcaaaaatgattgccccctcttcctcagtctccatgtgtcccccagaagttctccttccttctcctaatctctcaggccccatcacataaaccataaacagctcagtagcttaactttgggaagcaaaagtcatcatggcaagcgcctagaggcatgttccttctgctttggcaaaccattaaccaccaaggcagggaggaagtaaagagggaaacattagtgaatttctcaagaagtcacctgccacccaatggtcacagtcccccaaagtgagagaagggtggaggcatgtgctagggagactgtggcaaaaggaagggagtgggagacccaggcttcctctagagctgcctgtgccagggctgtgctgggggaacactgccctccttgctgtcaatcatagcagttacctggagggtcttttcaactttgctttgctcaaacctctcactgttctaaatcagccccctcatctctcccctgggctgttgcagaagtctcaatccattctcatgcaaatcgattctcatggtattcaaatctgcctgtgtttctgtctttttctttttccctgccccatctggctccttgagccttattttccagccatttacagaacagcaccatggtgtttcacctcagtagtcaccaaggtgactgctgtttcctgctgttcccctactaggaaagcaatacttacctagcatgcaaaagttgctcttttctctgaaaatccacagatgctttttagggcagtgaaaatactctgtgtatgataccataatggtggatacctgtcatgacacatttgtctaaatccatagaatgaataataccagcagcaaactctaatgtaaacatggattttgggtgataatgatgtgccaatgtaggtccaacaatagtaataaatgctcccgtgggagaatgtttataatgggggggctatgtatgtgtaggggggaagggctagttgggaactctgcacattcctctcacttttgtggcaaacttaaaactgctctaaaaaaaagtaaagtatttacaaagtcatttttgataaagtatttttttctgcccccacttattgacagactttccttgagaatccccacctgtgccctgtacccacttccctctcagcactaggcaccctccaaggtccctgctcatttgcatattttcttaccacaccagcatgtgagtccttcatcagcaggatcagtatctcccaggacctaatatgtgactggcacatagtgggtctgctgtggctattggtggaggtgatgttccctggtgggctggggaggctccacaggagaaggaaaggctgagctccttttctttcttcttccttattttggcttccttcctctgccctgcgtttggaaacctgttttgtttgtttgtttagaaagcttggctagtaattcactagtccaatcaggctgtagggtagaggatggagtggctcatttcatgtcttttgttcttgaaaaaattaggggtgagtgggaaagagaatgagagaatgaacggaaggaggaggggccgtgtccagttgctgttttcagggagactcatcttattaaaattttgctgtgtcatcaactggcccaactggtttttagggtcaaggagaaagttttcctttgggactggacaggtggaatctggcctcacagtttctacaacatatggcaggatcctgctcttctgtcccctgtagcgggttgtcccgtgttccccttaaggaagaaatcacagtttttgtcctcctggtgcttccggctggaggttcacctgctagtccctgatcctctttgcttagtgatgcacatgagtctactcatccccccaccactcccagcccccactggtctaggcaaaatgcaagtgatgggagagtgtgggtgggcaattctttctctggagggtttaggtgggtacctcaaaacagcaggcagctaggacttgaagtggtggcttcgcagctaacattttccttgttccacatgatgggtaggggtagggtagggaagacttcactgtttggagtttcggaggatgcccctctttctctttatccttcctccccacagtcccctcccatctcctcccttatacctcttttttttttttttttttttttttgagatggagtttcgctcttgttgcctgggctggagtacagtggcgccatctcggctcactgcaacctccatctcccaggttcaagcaattctcctgcctcagcctcctgagtagctgggattacaggcatgcgccaccacgcccagctaattttgtatttttagtagagacggggtttctccatgttggtcaggcttgtctcaaactcctgacctgaggtgatccacctgcctcggcctccgaaattgctgggattacaggtgtaagccaccacgcccagcccttatacctccttttaagcaatgtcctcaccccaaatccatctcagaaaattgtccctacccatatggtcagaagtccttcaagactcctggaaaagaaatcacaactacttttaaatcaaacgtctgactaattttggaacagtgagaacaggggctggttttagtcatctttggatcaggtgcccaatacaagtttgttgaatgaatgcctgactggtcaagacaaaatcagtctttcaaacagaagctagaaatcaaaggttgcctatagccccattcctctgtccatcctccccatctgttgagatggcacgatttcagaaaaacatccctcccactggtcaatcctttgaaagcttaattattcagagttctaaatgacccctttaagggttgatcatataatgctttgacccgttggactgtgccagtagaggaggagatgttctgtgttccccgagcctcttcatccaagaattccaaagtgactcctcctgccttgatccctcccaatggccctctcctcctcatagcccatggggacctcttgctggggcgtgacgctgcccacggaggggtggaattgcttcttctttttttttttttagatgaagtctctctgtcgcccaggctagagtgcagtggtgcaatcttggctcactgtaacctccgcctcctgggttcaagtgattctcctgcctcagcctcccgagtagttgggattacaggcacctgccactgcgcccagctaatttttgtatttttagaagagacagggtttcaccatcttggccaggctggtctcgaactcctgacctcaagatccacccgcctcggcctcccaaagtgctggaattacaggcatgagccaccggaattgcttcttaatgcagaatgtgtgtgcaagactgtgaaacagcaagagttggggagaaagcgtaggtttctgtgtgcatggtacctttaggactggctgtgtgtccacccacaagccagcgaaggaggtgggaacctgggattctgtttacccagccaccaacaagccccgttgcctttctggcacacacaagcccaatcacccagaactcctgaaaatataaatgttctcaagatctcatgtgggagctttttagctgagaccagccacacatgcaggagactggaagcactatttcccaggggtggaacaacctgctcagactcacttttagattggaggatacccatctcagcgtggattctcccaagaacagatcttaagacaagggcttggatgtaggtaatttacttgggaggtgattccaggaaataagagtgaagaaatggggaaagcaagctgtgaaagggagagaagccaacagtaaggtatgctgatgggccagttactgccatgggcaactgaggctcagtctggcttggcgtccactgagaaaccttgtagaacagccctcagcattgtctgcctggatgaccaggaggccagagtatttctccactgacttcagtgtcttggttgcttttcttttctttttttttttgagacggagtttcgctcttgttgcccaggcaggagtgcagtggcatgatctcagctcactgcaacctccgcctcccgggttcaagagattctcctgcctcagcctctcaggtagctgggattacaggcatgcgccaccatgcctggctaattttgtatttttttagtagagacggggtttctccatgttggtcaggctggtcttgaactcccgacctcacgtgatccacctgccttggcctcccaaagtgctgggattacaggcatgagccaccgcgcctggccctcttttcttttcttttctttttttgagacagagtctcactcttgtcacccaggctggagtgcagtggcgccatctagactcattgcaacctctgcctcctggttgttcaagtgattcttgtgcctcagcctcctgaatagttgggattacaggcgtgtgccaccatgcccagctaaattttgtattcttagtagagacagggttttgccatgttggccaggctggtctcaaaatcctggccttgagtgatctgcccagctcagcctcccagagggtactttcaagttacatctatggaacaaagcaagccgctctgctaagctcctccagttattgattacacaacccccacagctgtgaccaccatttggctaccaccatcatcacagcttctgcccctccaatttcccccagccaattatatcactgccttttctctctgctaggttctgttaggcctgagctttaaagagaaaggaataaagtggaatgatatatctttgcccataactcattctaggaaaaaggaactatgctggttttctttttcctccatttcaacctatccaatctacccaaatagttcccaatcattatcacctcatcccaaagcaacagacgggaaagaggaacagggcaagaaagcagacaggctttctggagtgacttttatccccacagagtcatagatgcagagttggaagagatgaattctctcatttgggagataaggacaccatgcagataaagagactctgtatcttctgcttttcctgctgctgcagtgcttcctccaggcaggcttccttagtttttcttggcttcctacccttccaacctacgccatcataatctggactccagccctttattccctcaaaggctgactcaggccatgactgagggaagaagcttggattctgtagtggaacagcattgtccatggggagacacggcttccatcccaggcctttggttccattacttagtttctcacttgcctgtctgtcatccaaaggggctcacaaggaggggaatgcagggaggagacatctccctaataccattggagtttttttccaggttaagatggtgcattgaatccacccatctacttttgctcctcccaaaactcactaaaactattataaagggattttgtttaaagacacaaactcatgaggacagagagaacagagtagacaatagtgggggaaaaataagttggaagatagaaaacagatgggtgagtggtaatcgactcagcagccccaagaaagctgaaacccagggaaagttaagagtagccctattttcatggcaaaatccaagggggggtggggaaagaaagaaaaacagaaaaaaaaatgggaattggcagtcctagatatctctggtactgggcaagccaaagaatcaggataactgggtgaaaggtgattgggaagcagttaaaatcttagttcccctcttccactctccgagcagcaggtttctctctctcatcaggcagagggctggagatttcacctccggagagagtaaaaaggaggatctctgggctggggcaccaggcgtggctgaggacaaaggtggcatgtggagaacaggggcgttaagtgactatttcctcactgcatgctgagaacctcagctttcttctctgatcacttcccaaatcactggcagctactctccacctctcttctctgagcactctgaccagccaaaagggaaagaatgaaggatactggcattcagatttccagtaaacgaccatccatgtctccctacggtgaatcacagttgacaagcccagttcctgcactcagggtttttcatagtcctttactcttaatcaagagcagagagctaaagattatgtcttaggttccctagaaacagaagctgtgatgcagattcagatgcatgcgatttattgcgggcgggccctcagaagaagctcctttttccacctccagaaagagcatggaaaggaactgagcaaggatgtggtcttggctggagtctagcctcagtctgacccacagggagccctggagcatgaattgcaccacagggttgatctcaccttgaagcaagagggccagcttttgtatccatatattgatcaatcactggctgtgggctgccagggaggaagccatgaattcccaggcaaggtagttcctacttgaggacaattctttagataaagtggcagctctggtctatttatgaccgagatttatagcagctgaaggtatgggcagaacaccaataacatctactgtagattaccagattaccaaatatctgaggaaagctgctaacatggaagatagaaaataaataacaataaaaacaagtcaaaacaagcaagcaaactaataattaaaataaacagaaaaaggcaagttggaggaaaccaagatttatttttaagaataagaggtgataggcagttcggcggtccagtgggtctgtctcttgcttcaacagtgtttggacggaacagatccggggacggtcttccagcctccgaccgccctccaatttcctctccacttgcaacctccgggaccatcttctcggctatctcctgcttctgggacctgccagcaccgtttttgtcgttagctccttcttggcgaccaaccatgagctcccagattcgtcaaaattattccaccgacgtggaggcagccgtcaacagcctggtcaatttgtacctgcaggcctcctacacctacctctctctgggcttctatttcgaccgcgatgatgcggctctggaaggcgtgagccacttcttccgcgaattgaccgaggagaagcgcgagggctacgagcgtctcctgaagatgcaaaaccagcgtggcggccgcgctctcttccaggacatcaagaagccagctgaagatgagtggggtaaaaccccagatgccatgaaagctgccatggccctggagaaaaagctgaaccaggcccttttggatcttcatgccctggattctgcccacatggacccccatctctgtgacttcctggagactcacttcctagatgaggaagtgaagctcatcaagaagatgggtgaccacctgacgaacctccacaggctgggaggcccagaggctgggctgggcgagtatctcttcgaaaggctcactctcaagcacgtctaagagccttatgagcccagcgacttctgaagggccccttgcaaagtaatagggcttctgcctaagcctctccctccagccaataggcagctttcttaactaccctaacaagccttggaccaaatggaaataaggctttctgatgcaaaaaaaaaaaaaaaaaaaaaaaaaaaaagaataagaggtgatattacacccatgaaacaagaataagatgctattttgagacaagaaacaaaaaataagctttaaaataaacacacacacatacacacacatacacacaacagcagaaatgaaaaattcaatggatggcttgagaaaaatgtctagaatatctcacagaaaatagatctgaaagacaaaacaatgaaaaacaggaaagaaaagatgaggaatgtagggggaatagtccaaaaggtttaacatctgaataacaagcatttcagaaaaggagggaaggaaatcatcaatgtgataattcaagaaaaatttcccaaattgaaaaacataaattgccaggtcaaaagggctcaccgtttgcctagtttaaccaaggcacataattgtgaaatttcacagccctaaggataaagagatgattccacaagcttgaacaaataaaagaataagtcatatactaagtcttaagaatcagcatggctccagacttctcttcactggaattgttccagcaacactggaaggtagaatactagagtaatatcttcaaaattctgaagaaaaattgtttccaatctagaattctatatacagtgaaacaatcaagaaatgagtggaatgaagacaatttcagatatgcacatcccatgtttccttttctgggaagtaatttaaggatgtgctccaccaaaccaagggagtaacccaaagaaaaagacacaacatgtgggaaatgggagatccaacacaggggagagggatgaggaatccctatgaggctgagatgatgaaacttggaggattggagcagagagactcaagagatagatatgttaaagactgtcatcaccaaagtgactactgtcatattgccatctttatagccactttttgttagaagcacagacttttgaggtaaattagataaaggacagagatcccacatactgttggaaagaggactggcctaatactgttgaggcttgggttctagtcctgacttactcttgaagtaggtataagatctgggtatgtcatttttcctccctggatctcaggattatcctctctacatgtcaaggataggctaagtgaattacatgtatttttaaggctattgtgccttagtgacatgtattcttcatggcactgtatacggttatatggcttttgaaaatgcagagtcatgtaactacctccacagtcatgctacagaacagttgcatcaccccccaaaaatctctcatagctcccctttgcagtcagcctcttgcctcccccttaaccctgtcaaccactgaccttttctccctccctatagtcttaccttttctagaacgttagataaatgcagtcatacagtatgaagcctttcagatctggtttctttcatttaacacagtgcatttagttttatgcactaaccagcaattaccactgatcttgttttcagttctctcccaaagcagatgctaagacaagaattcaagtgcaagtagtttatgtgggaggtgatctcaggaagcaccagttagcggagtgagacagggaagggaaagaagccaatacaggatatgtcagcaagcaagctaccactgtgggaaacaagctcaccctgctggagactctgggatccagtgcagagcacacatctcagctctatccagcccaaggagcgaaaaagctgggatttttatctaccaactccctgtccatcagtggttgagtgctacttcttagggccttcactctccagcacttctggcttgccctgtgcacagaccaagcatgttcctgtgactagaaataaaagcccccaggcagaaagcaacagatgttcacattaagcagctttccatgtgcaggggcgaatgccaagggtgatgtgtaagacactggcagcgtcagctgcttccaacccaacccaaatatttttattgttgtatgtgaagggaagcaaatatatactataaattcttaaattcattctgctggataaagagagaaaagtcctggatttcttctcaataggccaattttaaaggctacttttcatatataggatgggcaaagcacttttaaaaacatttatcttagattttcactgtatttatggtttacaagggtgctttgcatgtaaaacttaatgtttaaatagcacaagctcatacagtccatattcaatccctcgattattaatacaaaactcaattcaagcaaagacaaaggatataacagaagctaaatccaacttgtgaataatgagaataattgatttgtttaggttctattattcagaaagttatgtctttgtttttttttttttttttttttttccaggcagggtcttgccctgtagcccaagttggagagcagtggcacaattatggctcactgcagccttgacctccagggctcaaggatccccatgtagctgggaccagaggcacacgccaccatgcctggctaattttggtattattttttgtagagatggggttttgccatgttgcccaggctggtctcaaactcctgggctcatgcaatccacctgccttggcctcccaaagtgctgggattacatgcgtgagccactgcgcccagccagaatgttatgttttaaatttatctgtgttatcagttgggtctctttgcttctttaaagaaaatttaatatttaaattaactttttttttttgagatggagtcttgctctgttgcccaggctggagcgcagtggcgcgatcttggctcacagcaacctttgcctcctgggttcaagcaattctcctgcctcagcctcccgagtagctgggattacaggcatatgccaccatgcctggctaatttttgtattttcagtagagacggggtttcgccatgttggccaggctggtctcgaactcctgatctcaggtgacccacccacctcggcttcccaaagtgttgggattacaggcatgagccactgcgccctgcgattaacttattttttatacatctaaaatgtacaagtgcagttttgttacatggatatattgcatggtggtaaagcttttagtttaccactgagatgtattctttgtatcctgtctctggcagtcagctcacagtgtattctttgtatcctgtctctggcagtcagctcacagaaatcctcgctggctccagccacacccaggattgtgtgattccttgggggctggctgccgctcctgtgtgcctcttgacgcccagtgtattccaaggtcctgtgctgggccaggggaacttagtagattatctaaggcacttctttatttttgggttattctcaggtgtgcacaactcattcttttacttccacactttgctggctcttggcagccctggcaaggctgtctcaacctgcctcatgtgcacacagctatctctatttgggagtctaactgccaccctaagctctatccagggttctcactgtacttacatcccccaaacctgaatgggtttcttccttctttccttccttccttccttccttccttccttccttccttcctctctttctctctctccttccttccttctccctctctctttctctcatctctctccttctctctttccccctccctccctccctccctcccttccttccttctccctctctcatctctctgtctttctctcttcttctgtctttcccttcctcccctcccctccctctctccctccctccctccttcctcctcccttccttcctcctcccttcctccctccctccctcccttccttcttttcaagacagagttgcccaggctggagcgcagtagcacaatcttgactcactgcaacctctgcctcccaggttcaagcaattctcctgcttcagcctcctgagtagctgggattacaggtgtccactaccatgcctggctactttttgtatttttttgtagagatggggatttcaccatgttagtcaggctggtctcaaactcctgacctcaagttatctgcccacctcagcctcccaaagtgctgctgggattacaggcatgagccaccacacccggcccaagctcttttccttagacatccaccatcatgtgactctccttactactgagtttggggatttattctgtatatgtgggtgaatgcttgctctcaaatgcattctttcaaatccgttatattgtctacacctatattcctctaggtttctttctaatgaactttctttaaaatttacttttaattttgagacaatggtagattcacatgaagttataagaaataatacagaacaattctgtatagccttcacccagtttcccccaatggtaacatcttgcataactataccatagtatcatagccaggagattgacactgataacgtcaatcttattccattttccctagttttataggacttgtgtgtatgcatgtatttaattctatgcaattatcatatgtatagattcgtgtaatcaccaccatagttgagataaaaaatagttcaatcaccacaaggatcttttgtgatgtcctttaatttatttatatttatttatttatttatttttctgagacggagtctcgctctgtcgcccaggctggggtgcggtggcatggtcttggctcactgcaacctctgcctcccaggttcaagcgattctcctgccttggccccccaagtagctgggactacagccacgtgccaccacaccccgctgattttttgtatttttagtagagacggggtttcgccatgttggccaggctggtctcaaacccctgacctcgtgatctgcccacctcagcctcccaaagtgctgggataacaggcgcgagccactgcgcccagccttgcccttttataatcacacctgcatcctccctcccgacccgccttttccctaactggcaactatgaatgagggttctccatctgtataattttgtcctttcaaaatattatataaatgaaatcatgctgtatgcaacctttgagaactggctttgtttactcagcatactacttccctggagattcatccaaattgttgcacgaatcagtagtttgttcctttttattgctgagtagtattacagggtatggatgttccacagtttgtttaaccattcaccttttgaagagtatctggatcatgtccagttttaagtgttacaaagagtcaacacaataagatagtgatgaacatttgtatatgggtttttgtgtgaatataatttctctgggataaatgtccacgagtgcaattgctaagtcacatggaagttgcatgtttagttttgtaagaaactaccaaattgttttccagagtggctgtgccattttacattgccaccagcaatgtatgagtgatctggtttctctgcattctcaccagcatttgttattgtcataactttttattttagctattctgataggtgtgtagtaataactgattgtagtttttactttgcatttctcacgtaattactgatggtgaactttttttttcttatctctatttgccatctgtatattctatttagtgaaatggctggtcatatcttttgcctattttctaagtggattatttgtgggattttttttccccttgagttttgagagctctgtatgtattctagataatagttctttgttaaacatgtggtttgcaaatattttctttcagtctgtggcttgtcttttcatcagcttaaagggtctttcacagagtaaaagttttgatgaagtttaaattatccaattttccttttgtggattgcacttttgctgttaatcctaagaactctttgcttagccctagatcctgaagattttcccctaagttgtttcctaaaatgtttgcatttatatttaagttcatgtttcattttgagttaatttttgtataagttgtcacgttttggttggagttcactgttttgttttgcccttggatgtccaattgttacagtacaatttgttgaaaaggctatccttccttcactggattgcttttgcacctttgtcaaaaatccgttggcactgggcagggggctcacacctgtaattctagcactttgggaggtcaagacatgaagatctcttcagctcaggggtttcagaccagcctgtgtaacacagtgagacctcacctctataaaaaataaacaaaattagccaggtgtggtggtgtgtgcctgtagtcccagctactcaggaggctgaggtgggaagatcgcttaagccaagcaggtcaaggatacggtgagccatggtcatgccactgcactccagactgggcaacagagttagaccctgtctcaaaaaaaaaaaattgtaaaaaaatcagttggcttatttgtgtggatctatttctggattctctattccgttccattgatctgtgtgtctatccctttgccaatattgcacagtcttgattactgtagctatataataactcttgaaattcctcttactttattcttattttacgtaattgctatatctattctagggtccatgccttttaatataaattttagaataaattagcctgtgtctataaaaaccctttctgggggttttgataggaattgtattaaacttggagataaatcttgggaaaacttatatctttattatgttgactcttccaaaatgtaaacaaggtatgtttagccatttatttagatctttaatttcttttaccagcatttgcgatttttatcatacagatcctatatatgttttgttagatttgttcctaggtttttctttttttttttttgagtgattgaaaacgttattgggttttaaatttcagtttctgtatgttcaatgccagcatataaaactgtatgctgatgttgtgcgttgtgaataaactcatttattagttctaagaggtttttttggtgggaattttcttgaaattttcaatgtagatcctcatatcttctgcaaataatgacagtttcatttcttcctttataacctgtatgcattttttcatgtcttactgcactggctagaatttccactaatatgttgagtaagagtggttagagcagacatccttgctttgttcctgattttaggtggaacgcattcagtctttcaccaatatgtatgatgttagttataggttttgtagatgcttttttaatcacattgagatagttcccctgtattcctaacttgctgagtttttaaaaatcgtaaatgagctccctctccctcccccgcccccctctgatgccgagccaaagctggacggtactgctgccatctcggctcactgcaacctccctgcctgattctcctgcctcagcctgccgagtgcctgcgattgcaggcgcgcgccgccacgcctgactggttttcggtttttttttggtggagacggggtttcgctgtgttggccgggctgctctccagctcctaaccgcgagtgatccgccagcctcggcctcccgaggtgccgggattgcagatgaagtctcgttcactcagtgctcagtggtgtccaggctggagtgcagcggcgtgatctcggctcgctacaaccacctcccagccgcctgccttggcctcccaaagagccgagattgcagcctctgcccggccgccaccccgtctgggaagtgaggagcgtctctgcttggccacccatcgtctgggatatgaggagcccctctgcctggctgcccagtctggaaagtgaggagcgtctctgcccggccgccatcccatctaggaagcgaggagcgtctctgcccggccgccatcccatctaggaagcgaggagcgcctcttcccggctgccatcccatctaggaactgaggagcgtctctgcccggccgcccatcgtctgagatgtggggagcacctctgccccaccgccctgtctgggatgtgaggagcgcctctgctgggccgcaaccctgtctgggaggtgaggagcgtctctgccccgccgctccgtctgagaagtgaggaaaccctctgcctggcaaccgccccgtctgagaagtgaggagcccctccgtccggcaaccaccccgtctgggaagtgaggagcgtctccgcccggcagccaccccgtccgggagggaggtgggggggggggtcggccagccgccccgtccgggagggaggtgggggggtcagccccccgcccggccggccgccccgtccgggaggtgaggggcgcctctgcccggccgcccctactgggaagtgaggacccctctgcccggccagccgccccgtccgggagggaggtgggggggtcagccccccgcccggccggctgccccgtccgggaggtgaggggcgcctctgcccggccgcccctactgggaagtgaggagcccctctgcccggccagctgccccgcccgggagggaggtgggggggtcagccccccgcctggccagccgccccatccgggagggaggtgggggggtcagccccccgcccggccagccgccccgtccgggaggggggagggggggtcagccccctgcccggccagccgccccgtccgggagggaggtggggggggggtcagccccctttccggccgccgcctgtccgggaggtgaggggcgcctctgcctggccgcccctactgggaagtgaggacccctctgcccggccagccgccccgtccgggagggaggtgggggggacagccccccgcccggccagccgccctatccaggaggtgaggggcgcctctgcccggccgcccctactgggaagtgaggagcccctctgcctggccagccgccccgtccgggagggtagtgggggggtcagccccccgcccggccagccgccccatccgggaggtgaggggcgcttctgcccggccgcccctactgggaagtgaggagcccctctgcccggccacgaccccgtctgggaggtgtgcccagcggctcattggggatgggccatgatgacaatggcggttttgtggaatagaaaggcgggaagggtggggaaaaaattgagaaatcggatggttgccgggtctgtgtggatggaagtagacatgggagacttttcattttgttctgtactaagagaaattcttctgccttgggatcctgttgatctgtgaccttatccccaaccctgtgctctctgaagcatgtgctgtgtccactcagggttaaatggattgggggcggtgcaggatgtgctttgttaaacagatgctttgttaaacagatgcagcgtgctggttgagagtcatcaccactccctaatcttaagtacccagggacacagacactgcggagggccgcggggtcctctgcctaggaaaaccagagacctttgttcacttgtttatctgctgaccttccctccactattgtcctatgaccctgccaaatccccctctgcgagaaacacccaagaatgatcaataaaaaaaaaaaaaaaaaaaaaaaaaagaaaaaggggcccaggggacaggcattcagcatatggaggatccacgccagccccggctgctgcgttcccttagtatttattgctcattatcgggcgtgacaggataataggataatggtggggaggtcagaaggtaaacacgtgaacaaatgtctctgcaccataaacaaggtaaagaaaaaagtgctgtgcttttgatgtgcatatacataaacatctcattgccttaaggaacagtattgctgccagcatgtcccacctccagccctaaggcggttttctcctatctcagtagatggaatatacaatcagctttacacccagacattccattgcccagggatgagcaggagacagaagccttcctcttatctcaactgcaaaaaggcgttccttcctcttttactaatcctcctcagcacagaccttttacgggtgtcgggtgtcgggctgggggacggtcaggtctttcccttcccacaaggccatatttcagactctcacatggggagaaaccttggacggtgcctggctttcctgggcagaggtccctgcggccttctgcagtgttttgtgtctctgggtacttgagattggggagtggtttgagattggggagtggtgatgactcttaacaagcatgctgccttcaagcatttgtttaacaaagcacaccctgcacagcccttgatccatttggccctgagttgacacagcgcatgtttcggggagcacagggttgggggaagggttacagattggcagcatctcagggcagaagaatttttcttagtagggaacaaaatggagtctcctatgtctacttctttctacacagacacagtaacaatctgatctctctttcttttccccacaatgtggttttgggcgactgtagtcccggctacttgggagactgaggcaggagaattgcttgaacctgggaggcagaggttgctgtgagccgagattgtgccactgcactacagcctgggcgaaaaaagcaaaactccgtctcaaaaaaaaaaaacaaaacacttgtgatttgggggttttgtggaaatttaattacgatgaaaaatctgtatcttttttgtaatgttggcatacttgggtaattttgtggcaaatatatttcccagtggaccttttgttggtggcactaactgcaaggttgctgggaaagtggagtctgtttggtggatgagctctgactgccgttttggaacctcacctctactcatgctgtctcaagtccttgtctcattctccagctctcagttcaaataaagttatttctcctgggaaaaaaagttccgtgaaacgcacactggatgacagtgctgaagttgggtgccctgggaagtcctcaggacacccctgcatgaaggctgccccaggagagcagcgcaaggttgtggaggtctcaaagctctgaagaacctgcctaccgaagacaggagtgcccacaaaacagttggcccatgggctccccaagacctacgtgtacctcggaggcatttggcagaagattctttgtgaacaaaaatctctgcccactaggaggcaggagtgtgtgtgtgtgtgtgtgtgtgtgtgtgtgttgaaaccagaactccaccttatgtgttcattgtggaatttgaaaatggaagcctaaagttgaaaattaaaatcacccgtgatagctgtaaaaaaaaaaaaaaaaaaaaaaaaaatcgtaaatgagttcttactttggaagcatatatactaaagttggaatgaaacagagaagattagttactgatttcatttttcaataagtttagatttattatgttggtttcccaatttaaaaaattgacttcttaaaaaatcataaatgagtgttggattttgtgaaatgctttattctgtatcaattgatatgattataggattattattttttagcctattgatatagcactgtaataaaagttatgtgaatatcctctctctctgtctctctcaaaatatcttactttggctgggagcagtggctcacacctgtaatcccagcattttggaaggccgaggcaggtggactgctttgagctcaggagttcaagaccagcctgggcaacttgctggttgcccagcaaacttgtttctacaaaaaatacaaaaaaaaaaaaaattagctgggcaatcatgcctgtagtcccagctacttgggaagctgaggctggaggccagttcctgagaagtcttttctttcctccatctcttctcttggtctctgtgttgtgctaagtcaaggatagcttcctcctttgacagattatctttgactttgcccatcaggtgagagggcactatcagccacaggaccactctctcgtttactcatcggggagatgttctgctccctgtggtgtgggtgtggacgctttactctggaatcccttccagtggacgttaagcatccccctcagggcttggagaggaccaatgaacaagggaagcagggcaggcaaagagtctgaggcaggcggctgatgaaccaggtcttcccctgagtgatgctgggaaaagaagcacgttgactaagcacctgtgatgtgccatacactttcatatgtgttaattaatcccgtagtgaccctgtgaggtaggtataatgatcatccccatttacaaatgaggaaactgcagtgtaaaagaatttaaaactaggtttaaaaatgagggaaatagaaaagcaccattaggcaaacctatagtaataatggttgcagtaagattcactgatagttgctaaaagtatttttattaattataaaggaaaaaatggctgggtgtagtggcttatgcctgtaattctagcacatggggaggctgagatgggaggattgcttgagatcaggagtttgagaccagcctggtcaatagagtgagacttcatctctattgttataaagaataaaacaaaatttaaaataaataaattttaaaaacgttttaagaaggaaaaaatataaaagtggagaaatccggtaaataccaccctaatcaagtgatcaaggttagtattactagtaataattgatactgacattaggtactccctgatgtgatgccttgagttgagcacagtatcatctcttacatcaatctcatcatgataaaacactagacaaacccagactgagatggggttccacagactcctactcaggtgtcagaattagaacccagagcccatcatctttccactctgggcaggaaaggtatggaggccaagggtagggggatgcctcctttctggagggaggcactgctgactgaacgtgtacccacctcagtacgtgggactcatgactacagtgtgctctgtaactagaaactacatctctttgcctgagggcattctccaaagcacaaaggtggttctgtctgtgctggccttcccactcctttttttttttttttttttgagatggagtcttgctctgtcgcccaggctggagtgcagtggcatgatctcggctcactgcaacctccgcctcccgggttcaagtgattcccctgcctcatcctcccgagtagctggggactacaggcatgtgccacaatgcccgactaatttttgtattttttggcggagactgggtttcaccatgttgcccaggttggtcttgaactgacctcaagtgatccgcccgccttggctggtattacaggctcttgagattcttaaacacatcacatcataaagtcccttgtgccatgtgaggtaatatactcacagcttctggagattaggatgtgggcatcttgaagggtatcattattctgtccaccacatgcccatggtccagggttcagaataaaaggggctctgagttggcaacatctgcccagaggaagccagtgctgtgagaaggggaaggtggtacaaggggctataaactaaaatgcagaaatacagaggaagacatatttcagtggttacatagcatgtggtgtgtgtatgcgtgactgtgtgtgtttgtgtgcatgtgcgtgtgtgtctgggggaaggaggtagaggaagtgagatgatggtgacagtgacagcagcttggagaagacaggggggtgggtctacttctgaggaagtccttggctgaggtagggccgcagagaggcagggtgagggtggagcctgtggtttcagagaggagttttaatggctgccaagaatgtgcacatgaagccgaaagggagtgcggcctggagctgcagtcagcccagagggcgggtggagcctgtcccagggcactaggatcgcagagaacgacaggagggagcagggctctgtgagcagggagaggaaaaagagagaaactaggtttgtgatggaaaatgggctatggtttcataattggaagtgcctgtgggcaatgagtataaatggagggtttggtaacacttggggaaaaattattaatttggaacttctataaagccttttgtctcctattaaaaatcctgtgggtaccaagtgaatttcatcatttaattctctcaataaacaatgaactgctactttgcatgggacaacattctctggagatgcatacagtgaacaaacaaggtgaatgaatggactcagggaattaggtgtcacaggcatagaaaggcaaggagatgaaggagtaagtcagcaagaggatgatggaggcagaatcagctttccccagcaggggatgacacggggttttcgatatcacctgcccggggaggcttgcccatttccactctccagcccacctgcccaggggataggctttgaaatgtatattccctactgtccgcctccttggagccattccttcatttcttccttcctcctcttcctctccccttgtcttcctttgccttggagcttgggaggctccaggcaagaagagggggactgcggcatctttctcttgcttccctctcttctttctaccctttggatcccattcaaaacagataaatagaggtccactgtgggcctggaatcatgcaggggttacaagacgggggactcccatgaccaagcgtgattctccagcaaggggatttctgggagcccttagcagctgacacatgcagcagctgggccaggggtggaccagcctgttaaggggatctgtgtggggcaccagtatcctctactatagcaaggatgtggagtagcagataatctcacaccctgctatagattggaataaaactttagaaagcaatttgctaatattgtatagagaggaagacacacatggcctgtgacccagcaattccacttccagtcacatacccaagagaaactttgcatgtgcatgaggagacaaggaatgttcattgcagcataatttgaaaaaacaaaagctggaaataaatgaaatgtgcatcttataggaagttggatctattcacgtaatggaatacagcaggtaaaataaacaagatttatgagtatcatcagagataactctaaaagcatgatgttgagtgaaaaaagcatgctaccaaatgatatatataatgttgccatttatttatgtattatttatttatttatttttgagactgagtcttgctctgtcgcccaggctggagtgcagtggcatgatctcggctcactgcaatctccgcctcccaggttcaagtgattctcctgcctcagcctcctaagtagctgggactacaggcgtgcaccaccatgcccggctaatttttgtatttttagtagagacagggtttcactatgttggccaggctggtcttaaactcccgacctcaagtgatcaacctgccttggccccctaagctgctggattacaagcttgagccaccgtgccgggcctaatgttgccatttatataaagtttaaagacacgcaaaacaatacgtttacatatatatgtgtatatatgtatatatgcatttatgtatgtatatatctgtgtatatatagtaaacatatatgtatgtaacatagtaaacatatatacacacatacacaaacacacacatatatagtaaaagtgtaacagcatgcttgggaatgctaatactcaatatagagtagtgggacttgcagccagattgcttggatttgcatcctagttccttttcttactagctgtataatcttggagaagttatttaacctctgcaggcctcagcttgcttatgtgttaaatgggaaatgccaattgtatcagccagcaattgctgccctaatgctgtgtaacaaacaacccctaagctcagtggctttcaaccacaagcagttattttctatccacaagcctgtgagttggctgtggctctgctggactgggctccaggaagtggcttaggttcatgtctgctccacgtgtctccaccagcaactatccagggcttgttcttttcagggcagaggtcacatgcatgggtggctgctgaaagcacatgatgccttcttgagtctttggcccagaactggcatattgcttccacccacattccagtggggtagggaaagtatacaccacccacagtgatccagagcaagggcagcaggagaaggaggtactgggagcaagtaatggtgcaatagtgcctacctgctttgtttgaagcattaaatgagttaatgtgtgtcaggtgcctggcacatagtaggtgctatattcttactaatcaggagaatgatgaactctgggagaaagaggaaatttaacttatccattaaatttcttttttaaaaacaaagatcataaaaagaaaaagagggaaaaatatttgctttcagaagagaaagcgagagagagagagaggacacgaatgctgcagactgaaccacagggagcattggcattcaggaaaaagaggaaaatggaagacttaattgtagactccaggaggcagggactgtgtgtggcctcactcatttctctgtccccagcaccatgtctgacacatggtaaatgctcctaaggagcacagggaaagaagaaacaatgatagaggcagaggttggagagaatctgagaaaaatgagaagctctcaccctaaaagctagaggagatcgttaaaaggggctggatagctgccttgtggactggtcagcagtggccatcatcccactctggacccagcctcactgttgggtctggtgttccaggacacaggggacagacttgctatttcatttggtgagttttgtctcaggccaagcttctgagtagtaggaggtgaaaggcccagtcccccgctattgatctcttaatttcagcatcctcttctctcccttttccctttggctgtccctgattctccttttcaaatctccttccagcctcccactcctcgggtccccactgcctggaggaatatgcagaggccaagacagaaaggaggctgggcacggaggctcacacctgtaatcccagcactttgggaggccaaggcaggcagatcacttgagcccaggagttcaagaccagccttagcaacatggcaaaaccctgtctctactaaaaatatagaaactaaccgctgtgatggcacgcacctgtacctgggaggctggcttgagccctggaggtgaggctgcagtaagctgtgatcgcaccactgcactccagtctgggaggtggactgacgagtgttgggggctctcagagaccaggaggggggccaggatagagcccttcttctttgttttcctactttggcctgaaaagctccactgagccttcatgaagggcaggcagccaaaggctggggagaaggtggactcatttccttgtaaattacgtggttatgagggcgggaatttcacatgtggctttttgcataatcaggttatcaggtagttggcccattcctgggctcataaagtctctggttgctctgactcatagcatggagtgggaggcgagccagcagggatggggctgggaggaggtgcccgccagctgcctgcttgggtggtgtcaggtggggatccttttcagagcccaagtgtcataaacatctgggcttgagaatcggtctacttgagttcaagtcttggcctcaccgcttgccagctgtgtgaccttgggcaagttcctaaccctccctagtcctttatttctgcattagggcaagggtggtggtttagagaaggatttgcctgggaaagagcaggtggctgcttaagcagatccccaggagggcagtatgtgggtgtggccaccaacctcctgaatccaatccacagatttccctgaaaaaatgtagtggtttgcactctggcaaaccgtggggcaatatctaataaactcactgcattaattttctagggctgccatgacaaagtaccatacactgggtggacagaaacaacagatatttatcctcccgcagttcaggaagctagaagtctgagatcaaggtgttggcagaaccgggctctaagagagaatctattccatgctctttttttttttttttttttttcctgagacagagtcttgctctgttgcccaggttggagtgcaatggcacaatctcagctcactgcaacctccacctcctgggttcaagcgattctcttgcttcatgctcccaagtagctgggattacaggcgtctgtcaccacacccagctaatttttttttgtatttttagtagagatggggtttcatcgtgttggccaggctggtctcaaactcctgaactcaggtgatctgtctgcctcagcctcccaaagtgctgggattacaggcatgacccactgcacctggcctattctgtgcttttctctgagtttctggagtggcgttccttggcttgcggcagcatcactccaagctctgcctttgttgtcatgtggcatgctccttgcgtgtctctgtctcacgtggctctctcttctgtgtgtgtctgggtccaatttccttcttataaggacaccaatcatattggattacagtccaccctaatgaccttctcttcatttgattatatctgtcaagaccctgtttccaaggaaagtcatgtttgtaggtatcagggattaagtcttcaacatatctttttgggggacatgattcaacccatatcacccactttacctacgaacagtaggactgaaaggcccagtcccctcctgtccacctcacaattccatcaactcctctcctaggaatataacttaaagaaattagtggttagtctactgaaagctgaaacgcatgtactagaatgtttcaagcatctttatttttaatagtcccaaactggacacaactctaaggtcccatccacaggagaattgacaaacagattagagtacattcacacaatggaacactactcggcaacagaaaggataaattgctgatacaagcaataatatgaatgaaagactacctttgtttggccctggctatttgtagtcctactatgtgacactattttatgaaattcaagaagagacaaaactagtctgatagatgtcagacataaataaaaatttattgagctgtacacttaagctatgtaaattatatttcaatttaaggagtttaaaaaaattaaaaaaatttaggccttggcatgcccagaagtcaatgacttactcccagggcttgactcccatttgccaaagttctaggagcttgatgtataaactggaaagttgacaagataagtcctaatgagaactctaatgagccaggggcccagtgcctgtgtcacctggatagtggcagagacaaactgtccaatgagatactcaggacaccctcttctgaggtgctgctggttgattatgccccttccttggactggatgccacataatgagctgggttctgacttcaccagtgaagtgtcctgtgtccttgtggaaatgactcagcccccttcctcatctctaaaatgcgtatacctaccctccctcccagggtggttgtgagaagcatttgacaaaacaccatatttaaagtcccattcataggaggtaggtactcaggtaatgtggtttccccttcctttcacagagctgggatgcagctactggctcagacatttttcttttgatccttttgggtgcagagccttttgctagtagccaaaagaggtgacgagacactcctgagaacttccttgtttctcaggtcacatagataatagataataacttatatcggcaaagctatttaaaaaacactaggaagctcacagcctaagaatatatcctccaccagccaactacctggagtcccctctaagtgtgtcttcctgtggggtcactattgccccctgtctaatgtgctgactttgtgagtgcgagggtggggcataatggtgcatttgttagtcctggtggtggatggaagggttgggagccctcattgcaggaagaaaggacagaatattttggagctgagctcattgagggggagatatttgagggtgctcacattccccctgttcccctgagatggccctgagtcctcagcaccctggtgagattaccgggagtaggcaggagtggtgagctctggcaactgccgcccttttgggtcttccctccatccccgggacccacccttctgtgtccctaccatcttaggctaggacaggaaggctgcagagagatagggctggtggggactggtgggcagtgcctgggtacaaggtacgttcctgaaggggctatttggagagcaaactccccaggtggatgccaggctacactggcagagtggggatctattttgattcccaagaattcaactttagaacaagtagtgaatgaggggattacgaacttcctacaagcatagttggatggtgcataggaacatgcccttgggccaatgtcatgagccctgggctacccacctcttggtgttctttccctctgtattagatttccccagagaagcagaaccagtagaataaatacataatgagagagagagagactaattttaaggaattgcttcatacaactatggaagccagcaagtccaaaatctgcagagtaggctggcaagctggagacccagggaagagccgatgttgcagatccagtctgaaaaaccctctgcaggtagaactctctcttgctcagggtggggatgagggtaggtcagccttgctctattcaggccttcagctgattggatgaggcccacccacattatggagggcaatctgccttactcaaactctactgatttaaatgttaatctcatcaaaacagcctcagagaaaaatccagaataatgtttgatcaaatatctgggctctgtggcccagccaagttgatacataaaactaacctccttattaaaacgacttcgccaagcagtacgaacagtagctccctgaggccctgccttgtgttgggggccttgtgctttgcctgattcaggtggaccctcccaacacatctgtttggtaagtgtcatgcttgtttcacagacgagttaactgaatcttacgcgatgtgacaggtgatgttggtgccctatctagatcccttttcccagctagtgtccccctccccagctggtgacggtgcagtggctaacaacttacatctgagaactttcatggaggattccgctggcaatgggattgtccttgtccaggacctagtgactcatgttcccttctcccatcatccagggatggacaacgactgactgacacaagggtacaaaagcctgtcctgcttatctcagggggcaattctgtggacagcttacacccagagctcccggtggattgggctgaggccaggctggactgaggccacgcccctgctgaacatcttcctctgccacatcctgcttccctccatccctttctcctgagatcatttcctccataaatcacagggattccacaaatcctcatcctgggctctgagtctaaagaataggacctaagacacctgtgagtgaggaatgtaaacccaggtctagctgccttcaaaggtgtcccacaggatcttcgcattgtccgtagctgacaggggtgaggacctccctggggaggggttcctggttgcagagagggaagactccccgccttttggaaggtctcttgggtttgcccccttccttctttgcttgcccacttctttcttgcctcattccacagaacagcaccagccacaggctaggagcctctacccagggagggcaaggggaggttgagggctacacctgtggctgggaaaggctgaatctatgagtcccatccccaaggattctcagagcagggagtcgctgctttctggggcaggggtgcagattcgcagcaatgggaatgtgctcgaaggcctgagctgctgcttgggagagagcatgagccaaatcctggtgggcaggctgcctggtcggtgggcttcaaatctaggctgcactctgaggcctccatttgcagcctccgcctgtgcgagtgctgtgtcaccaccctgggaaggcctctgttgggtttttccagaacttggaggtttagaagtgccccagtcatggctgctctagttagaatttcgcctccagctttcccagggggcctccagccctctctgagacacagctgctcagggacagtgaatgaatgagagcaaggggccccctgtggggacacgagagtttgcagcagagatggtggtgcccaggcctggcagagaaagtgctgggggcagctgcatgatggggcaaggctcctcattggcccccaaagaaccttccatcccacctggctagagaagacaatgaaggatggtggaggggggtggttgcgccagtcagcagaaggcttcttctcttaacaaaaaggaggagtgttgagctgttccgtttggttacagatctttactactgccttctctatgaaaagatatagtgtgggggctttggtgtcacatagatctgattcaaaaacctctgttttatccttataaattctgtgatgctgtgaaagccacttaacatctcagaacctcagttttctcatccataaaatgggtggccatgctcactgcataggcttgctgtctgggaaggggcaagtagatgaagaaagtagctcagcaagagacagagatagctttgcaatctctggaatgtgaatgaaaaattgagccatcttcaccatgaaggaactcatttgcttctagagacatggcggtgggggcagacagaaggccactgctcacccgttccagtgttaaaggcagacattactgattatatctgcataccccaagcctggatacagaagcctggtagcttctcttaattgatcagaggtggcacttgaaatggaacttatgtgtcatctctgcgctctgtcaagaggccttgacagccaccctggaggagtccctaggtggtgagggaagatttaagggaaagtaagtttgctttttaggtcttctagtttgagtgcctgggaatagagatggtttctgattgagcagcccaaaggctctatcatgttccagtagcttaagctactgagaagaggccaggcttggagtgggccttccggatgaccactcacttggcagggctggcctcactgaaggtggactcttacctgcctcccactgggagcagatcctgagacaaggattggagtacaagtagcttatttgtgaagtgaacctaggatctccagtagaagagtgaggaagtgagactgggaagagaaggcagtgagggagctggggtatttatacgccaattcccattgatcattagttgaggacttctggggtaggatgttaagtcctggttacatatggacagaacagggtcaggtggccagagaaagctctttgacaaaaataatcccaggtactggtatttggaagtggtaagagctcaaagcagtatctgctacacatgtggtcccacaaatcctgagcaactcaagtgagtttgtccgttgaaaatcagaacagcttaacctttcccaatgtagagctctctttaaaatgcaggcagcctcaccttgccctactctgcctctctcagggggaggcatggtccctacccagcatggctgctgtcactgccttctcctacaaccatgaggacagtgctcattgatcacaagactttttcagataagacctcataacccctctcaagagagtgagtgctctagtcagcccctgtaatgtaaaaggaataatcccagaaaaatctctgatgggcatttagcatgagacacacattaggtgcccaataaatggaagccattgatagcactactgttgctgcttagagataaaacctattggccaaacctatcctgaccccaaaagagatggaatttgtcagattcattcctccccagcagctactagagaggagtggagagagagagctgggaaaagccggaagaagttggagtaatttgggagaagagcctggagtccttccaagaaggagccctgggcaatgtgagttggggggttgatgagagcttggtgcccaggaggaggtggcaagggaggagagatgagaggtactacaattgtgccccatttttcattctctcctggtgagtccctgtcattagaaagggcatgttcgatctcatcttcccttctggttcccactcagagatgaggacttgcctccagggctcccagtggcttattcccatgttttcccatggtctggactcaaggagggaggggtctctctctctctctctttttttttttttctaatttagagacagagtctggctctgtcacttgggctggaatgtagtggtgcaatcatagctcactgtagccttaacctcctggtctcaagtgatcctgccacctcagcctcctgagtagctgggactataggtgcacactgccatgtccggttaattattttttatttttgcaccatgtttagctagtacccaaacatgtcagagagcccagcatgaaaccttacacaaaagagtacaaactgtatgatttgagattcttccaaactgttgaatgtattcgtagttgattcctctttctcgctgagtagtatttcattatataaatatgccaccatttgtttatccatttccttgttgatagacatttagtctctctctggttttttattcttgtgaataaagctatgaacattcatgtacacgtctttctgcagtcaaggatcatttcttttttcttttttttttgagacagagtttcgctctgtcgctcaggctagagtgcagtggcgcgatctcggctcactgcaagctccgcctcccgggttcacgccattctcctgcctcagcctcccccagtagctgggactacagacgcccgccaccgcgcccggctaattttttgtatttttagtagagatggggtttcaccgtgttagccgggatagtctcaatctcctgacctcgtgatccacccgcctcgacctcccaaagtgctgggattacaggcgtgagccaccaagcctggccaaggatcattttttatacagggttttgatttgctgtcctgctccactggaaaacttccctgccaagttagcgatagacctcagctagcaagacggatgagttgagtttcttcatgaagctacaattcatatcccaaactgaaattctcatctatgtccctgtattagttcgttttcacactgctgataaagacatacccgagactgggaagaaaaaggtttaattggacttatagttccacgtggctggagaggcctcagaatcatggcgggagacaaaaggcacttcttacatattggtggcaagggaaatgaggaaaaagcaaaagtggaaacccctgataaacccatcagatctcgtgagacttattcactatcacgagaatagaatgggaaagactggcccccatggttcagttacctccccctgggcccctcccacaacatgggggaattctgggagatgcaattcaagttgagatttgggtggggacacagccaaaccatatcagtccctaaactcaccccttccacagtctctcactgtgtttctggactcgttgctcaggctagaaacctggactcctctctgctcatattcttccaccaaacgatcggcaatctgatcataagtgctttcaaaatacctgaacttttatcccctcctctgctaccagtctggtctgggccactatcacttgtcacctggattactgcagtatccttctcttccttctctccagcttctacccttgtttctcttccaactcactctgctcctgatgtgattctcaacacagcagccagattaatcctttagaggctgagaccatgttcctcctctgctggaaaccctccaatgttccaacagctcccagcccactctaagtataagccacagtccttacaatgtctgtgaggccctaggtgatctccatcatacttccctcctatcatctccctactttctcctctttggtcactctgtgcatgtccctttaatatgctaaagttgcccttgcctctcagcctttgcactggctgttaccctgaatggaatgctcttccctttgatatccacgtggctccctcctttactttccttcaggcctatcgacttcaccagctctatctgtctctacagtacttaccaccatctgacacattctatttactggtttatatgttgtcatcggtctgtctgtctgtgttgcttatcagcatgtcaagcacacagttcagggacttcgcttagtatgcacttgtatccctagtgctcagaacagcaggggcctcgtcataggcactcaaataagagacacagtggggcctaggaacacctaaaatggagaatcaaatctggcagcttccaaccttagctcactagttgggtgttgtgtgtattaaggggctgctaagagcatcctttggggatctctgtctcctcagagatttaggtgactgctatgatttgaatacctcctccaaaattcactttgaaacttaatcctcggccgggcatggtggctcacatctgtaatcccatcactttgggaggctgaggcgggtgaatcacgaggtcaagagattgagaccatcctggtcaacatggtgaaaccccctttctactaaaaatacaaaaattagctgggcatggtggcgcgctcctgtagtcccagctacttgggaggctgaggcaggagaattgcttgaaccctggaggtggaggttgcagtaagccgagatggcgccacggcactccactctggcaacagagcaagacttcgtctcgaaaagaaagaaagaaagaaagaaagaaagaaagaaagaaagaaagatagaaaatcctcaatgtggcggtactgagaggtgggacctttaagagggattaggtcatgagggatctgctctcatgaatggattaatccatttaaggataaatggcttaatggattaatgagttatcatgggagtggaactggtggctttacaaaaagaggaagggagacccgagaaaccgcattcagcgcccccaaccatgcaatgccttgtgccacctggagactctgcagagtcccaccagcaagaaggccctcaccatatgaagtccctcgactttggattctcagcctccataactgtaaaaaataaatttatctcccttataaattactcactttcaagtattctaagtaacagaaaacagactaagcctgtaacattaggccaagcccccaaaagctcctagtctcacagcctatgtgagttcagtgtaggcttgggaattggagaagccttcaggaaatgatgaaatcaagctgggcctgggagcataggtggagtttgggtaggcaggggacagaaggacagtgtgggctagcttagggtaatgctgcttaggtgagttactaggggcaggcaccccgaacagagtatccgaagggctgcacccagcagtgacaccatcacctctctcctgtcctgactgggccgggctctgggggagaggtcccaacactgcccacctcttcttgttctcccaatatctgtcatcagctccagtttgcatttcagttatttttagattgttttttccttagcagtgaagcaagcctgtggaaggaaacatattccttctaaagcaagcctgcagtttctctggacaggcaagagtgaggccgcccgcctaaacaaagagaggtctgacgtctgctagggtgttctgggactcagtgggtccacccctgtcttcagtctcggacctggctgctcccagaccatttcaagcctaagacaatgacatatctcgctgggttttgaaagctgctagaggggcttcctaacctccttggctgtcctcatcatagctgcctccactccctagccctgcgctcagtgttttttgcagggaagttcttccttaagtccaaactgtggctccaaagatttcgttaccaagggagagagggagttgccactgatgcgcagtgctcaaattggactgggtggcttgcgtgggatgggtctgggagaaactgtcacagaggtcatgggaatgatgacagctgcaacacacggtgccccagaggcttctcaaccactggtaggtaggacgataagtaggcaggcagctggctgcagaggcctcttactcaccccatattctgccctgcctgggttctgggctctcctgagcctcaaggtctctgccctttctttagagaagagctgggtcccaactcacaggacttcctctaaaccctcctggacctcttccagagtcatgtctgggtcactctaaggaaggtcctcactggggacggcaagctgtctcagggtttggcttctcagtcttctcccagatcagggctcttgtcccaggatatgtggggttgggctgggttgagcacccctgtcccttcccataactttgttcaggttgtggactcctttagcaggctggtgaagtccatgaaactcttcagaataatgctcttaaatgcataaggtaaaatacaccagataacaaaggaaaccaattgcactaaaatgcagatattaacatattttaatatttataagatccagcaatcccactactgggtatatatccaaaggaaatgaaatcaaggtggaaggacagctgcacttccatgtttattgcagcactattcacaatatccaagctatgaaaccaatctaagtgtccatcaatgaatggataaaggaaatgtggtttatatacaaaatgcaatactattcagtcataaaaagaaggaaaccctgtcatttgtgacaacatgcatgaacctggaggacattatgctaagcaaagtgaaccagacacagaaagacaaataccacatgatctcactaatgtggaatttttgaaaaagttgatatcatggaagcagagagtagaacagtgcttaccagagacttgagaaaggagcggagaagggaggatggggagaggttggtcaatgggtacaaagtgacaattagattggaggaataagttctggtgttttattgcatcgtggggtgatgacggttaacggtaagttattgtatgttactaaatagctggaagagagtcttctgagtattctcaccacaaagaaatgataaacgcctgaggtgacgaatatgccaaacatcctgattgggtcatgcattgaaacatcaaattgtatcccataaatatgagtagttacaagatgtcatgaggtggtgtatttgttaattagctacgtttaaccattgcacaatatatattcttcaaaacatcatgttgcatgtgataaatacatatgaagtcatctgtcaattaaaaaaacaaatttaacctacctagacaacctagtgagaccctgtctctacaaaaaataaaaaaattagctgggtgtggccaggcatggtggctcatgcctgtagtcccaacactttgggacgccgaggtgggtggatcacctgaggttgggagttcaagaccagcctgactaacatggagaaactctgtctctactaaaaatacgaaattagctgggcgtggtggtgcatgtctgtaatcccagctacttggaggctgaggcaggagactcgcttgaatctgggaggcggaggttgtgatgagccgagattgtgccattgcactccagcctgggcaacaagagcaaaactccatctcaaaaaaaaaaaaaaagagagaaacgttctcttttcttttttagctgggagtggtggcacatgcctgtactcccagctacttaggaggctgaggcagcaggagtgcttgagcctgggagattgaggctgcagtgagccatgattgctcaatgcactcagcttgggagacagagagactctgtcttaaaaacattttttaaaaatgtgatatatactaatgaattttttaacacattaaagaagaaaatctagcagtggatctgctatggtttaaatgtgccccccataatcatgtgttggaaatttagtctccattgcaacatcgttgaaaggtaggacctttaagaaggggggaccttaggcagaaccctcacgaatggattaatgccattatatcatgagagtgggttgttataaaagtgagtttaggctgggtgtggtggctcatgcctgtaatcccagcactttgggaagttgaggcaggcagatgacttgagatcagaagtttgagaccagcctagccaacatgacgaaactctttttttttttttttttgagatggagtctcactctgtcgcccaggctggagtgcagtggtgcgacctcagctcactgcaagctccgcctcccgggttcatgctattcttctgcctcagcctcctgagtagctgggactacaagcacctgacaccagacctgactaatttttgtatttttagtagagacggggtttcaccgtgttagccaggatggtctcgatctcctgacctcatgatccgcccgcctcagcctcccaaagtgctgggattacaggcgtgagtcaccgcgcccggccgaaactctgtctttattaaaaatacaaacattagctgggcatggtggcgggtgcctgtaatcccacctaattgggaggctgtggcaagatagtcacttgagcctgggaggcggaggttgcagtgagccaagaaggagccactgcacttcagcctgggtggcagagcaagactccgtctcaaaaaaaaaaaaaaaaaaaagtgagtttggcccctcttgctttcttgttactgcccgctcttgcctttctgccttttgccacaagatgacacagcacgaagcccttgccggacgctggtgccatgctcttggactttgtggtccacagaactgtgagccaaataaattctgttcatgataaattacccagtctcaggtattcggttatagcagaagcaaacagattaagacaggatctaatatctatcacaatttcacaatatcataaatgatattttaagatatctgcaataactctaatatgttagggaaatagctgtgatttttgttggtgacaaagttgcagacactgctaaatactactgtcatctattgcctacattcataatgcaaggaaataccatatttcagttagaggcagtgaaaataatggggaaactttttttttccacccaagtttattgacatcaggataagaattctgcctttgggcccgacacagtgcttcatgcctgtaatcccagcactttgggaggccaaggcgggcagatcacttgaggtcaggtgtttgagagcagcctggccaatatggtgaaaccttgtttctactaaaaatacaaaaattagccgggtgtggtggtgggcacctgtaatcccagctactcgggaggctgaggcaggagaatcacttgaacctggaaggtggaggcttcagtgagctgagatcatgccactgcactccagcctgggcaacagagtgagactctgtctcaaaaaaaacaaaaccaaaaaaacagaattctgcctttgactttctcttaccttcattattttttggggctagattaaggacctggtggggctggagggggcaccaggcctggatttctcatttgtaaaatatacttattttatttttacttaaaaattttttttaaaaaattttttgagacagagtcttgctctgtcacccagtcaatatacttattttaaattaaacaggaagaaattggtgtttgtaaaaaattcaggcaatataaataaagacttctctcatttatcccccaaaccctcttccctcttcagtggtagcccctgttatctgtgtgttacatatagtttcaaattacaaaagtaatatttgaaaatatttgccttgaaaaaatcagatttttaaaagaactttacttactgtacatacagcaatacttagttttgtatgtagttacttttttcttttttctttttttttttttttttgagatggagtctcgctctgtcacccaggctggagtgcaattgcgtgatctcggctcactgcaagctcggcctcctgggttcaagtgattctcctgcctcagcctcccgagtagctgggactacaggcatgtgctaccacgcccggctaatttttttgtatttttggtagagacaggctttcactgtgttagccaggatggttttgatctcctgaccttgtgatccacctgcctcggcctcccaaagtgtttggattaccggtgtgagccactgcgcctggcctacttttttctaattaagaaaaataccagatctttgtctggtatgtgtgtagtcttttctcaaatgcaaataggagcatattgtacatgctctcttgaaacttgctcttttcctgtacaacgtgacatggaggtcttcccacgttagcacgtatggacttgcctcctttttttctcattctttttactgctgtttagtatgttgcataagtgctgggtcaaagggggaaccacgttttgaattttagtcaatagaattcagcagcctctcccatgcccaggatgtgggccaggcatcagtcacccaagctggaatttaggcactaatttccctctactccactctatttgcccaatctatcagcaagtctcctgagtatctgctagcattggctccggttctccaaccccactgtcacttccttccttcatcatctatttctcctgttggggtgaatgcattagcttacccctcccacctctcatccctagtcttcgtagtcctatctcctgcgtggcccatgttattctgtagtcggtttacctttcttgatctcgaatccaatcatgtcctccctgatcttaactcttccatggcttcccattaccttaggatcatttccaggtctttcagcttggcctattcccatcattccagctgtgccaacctctctggcggcatcattcctctgggggatctcactgcatgccctagatctcagtgatgcagacagtcgggacccttaacatttcaggctgcccgcactccatgccttgctcagtttctctgactgcaatgccctttctacttccttttttcttttctcctccctttcacgtggtgaacacccagccatcttttagggggtcatcttcccagtcactcattctggacattcttttctatcccctaaaagacaagtgagcattttcctttgagctcctgctgacattgttcaggcctttggcatagtcttgtcatgatttactgcccaatttgttcccctgctcttctcccctctaggctgtgaactcttgaggctgtctgaacagtgatggcatgccatctcctatagggaatggacatgcaaaaaggacacacatcacaagtgtgcagcttcctggctgtaaactgtaaactgaacctactcatgtcaccagcacccagatcaacagaatattaccagcaccccagaagtccccatgtgtccatacccaccagaatcccctttctgttctttaaagaaaatagtccacgatatccttgccgagttttagctgtttgtttgttttgaaacagggtcttgctctgttgcccaggctggagcacagtggggctcactgtagcttcaacctcctgaactcaagtgatcctcccacctcagcctcttgagtaactgggaccacaggtgcatgctaccaagcctggctattaaaatttttttttttgtagagaggtgggcggggggggggtgtggtcttcctatgttgcctaggctggtctcgaactcctggcttcaagctatcctcctgccttggcctcccaaagtgctgggattacaggcatgagccgctgtgcctgacctaagttgttttttgctttctggttttagtttttttgctttcagtttttcttgtgtttgtattttgtataaatgattcaaacagtatgttctcttttgtgtctagtttctttggctcagcatcatattggtgaggtttatcaaaattatatgtgtagttatagtttgttcattctagcagctgtgtattattccattgcgtgtgtataccacaatttatgtatccattctactgttgtcgggtgtttccaagacaaactggcaaatgaaaatgttgcagaatgtatgttgaatacataaacatatacatgcaaaacaatcccaagcatgtctataaatgcatagagaagtggttgcctgggaggaactggggattggggaggtgacagccaaagggactgtaaacttatctgtaatgttttaaattttctacatggaaactgtattccagtataacttagataattaaaaattaaatataatttttttacacatattcatgctctgtgcatttgggtcctcagagctatgttgggagaaatatcagtcagtcaatcaagcaagcaatattaaatgtgtatttatggcccagtgcggtggctcacacctgtaatcccagcactttgggaggccgaggcgggcggatcacgaggtcaggagatcgagaccatcctggctaacatggtgaaaccccgtctctactaaaaatacaaaaaaattagccgggcgtggtggcgggcgcctgtagtcccagctacttgggaagctgaggcaggagaatggcgtgaacccgggaggcggagcttgcagtgagccgagatcgcgccactgcactccagcctgggcgacagagcgagacacccgtctcaaaaaaaaaaaaaaaaaaaaagtgtacttatttatttatttgtaaattattttatttcttccttgatgacttagagggactatcatcaaaccagtacgaaactttcatacataatacctggccattttcttaccaattgagtaatttgttgcacaaaaagctacttaacgtctttcagcaagaaatacattaaatctgaatagtaaagacattacataatgaattaggacacaattaaaatttgctttaaatatttctttgggggaaaggacaccacacttctactcaacgaagagaaacatttttacagtccagaggtcttttatttttttaacacctattatgcctgaattcatagggaagaggttccagcagctcaggctccttctcattggttctcacaaagtgtgcttctctgggtggagcaggctggcgctttggttgaacccaggtgcctttctctttgacttctttctttgtctgatcattttccttcacgcgtctcaggaagccatctcggctcttagagtgcttcctgtgctcaatatgcacattaattctcttggcaagaatcttgcccttaacttgtttgtttagaacaatgccaacggcatgctggggaacattgcagactcttccagttttgccatggtgacacttgaggggcatgcctttttgaacagttcccattccttgatgtctacagtatcacctttcttatagattcgcatatatgtggccaaaggaacaactccatgttttctaaaaggcctagagaacatatatcgggtgcctctcctcttttcctctgtgttcatcatcttggcgaattactggaagatggcggctccagccgaaagctaaatgtgtgtttattatttgatcaaatatatcaaatcaaatagatcacacttacacgccatgtggccttgagcaagtgacttcacttctttgatccttagttccttgttctcttagcttggttcctcgccccgcccctcctgctgcctgccagcagaacctgagacaaaggcttgtgaacaggtagtttatttaagaacgtgatcttggggagcaggagggagggacagggacattgaatcaagaaatgagggagagccaatacaagatgtgacaccaagttagccagtgctatctatgggtgtctggaggtgggggccatcacagcctttcgtggagttttctgaaatgtctcagaactccctgctgggggacaaaaggcagaagcattattcactggttctcaccactgttggtcaagggacatcccacagcttcttagttcctcccacattgctgggctgctcgtgcatgacggccaagcatgttcccttgggtgtcccacccagctgtagtggagaagccccgggtcagctcagcactggctggaggaagagatctgctcaagaggtttttgaagtggtgtcccaaatgtgtctaacacattcatctttaatgtgaggggggtgtctccacttcaaagggacactgcaaggattgggctgaattccatatctaggtaacaaggcacccagggttggtgttctgaggtcctgggaaggatagggggtggaggagacctggcccccctactccagtgtggggctaaaggagggggaagctggaaagggagctgagctggcagaggctctgccatgttgcttctccagggctgggcagaggcccaagcaagacagtgggaaggacagcaggttccaggacacagggaggaagggggcctggagggatttccctgggcctggaatgcaaggatgaggttcctaataggtgccgtggccttgttcctgtgagaggaaggaaactgatgaggccaccgaatggagcagaaaaggtgcagtgaaaatccttaccgcctcctgccctgcagcctctgcatagtcacaggggtgactattttacatcacccctgatcacccactgtggtccagccttgatccttctcaaggttatgaaataatttgctagcagcccttgcttttcaagtatattacaggctagactaggggttcttaatttagggtcctgcagatacagtgtaaaagggtcaataaaacttagttgaaaaaaatgacatctatacgttgctctaaattaaattgagcactaccttcagttatggatttaggcaacaaaccacagagctgagtctttgtcaccagcagaagccacagatattttcacatcacatgacagttatagatattttgaaagctcatttatacttcaagattgcagtaattattaggccctctgttagatatcttggtatgtagtgtattaaggaagaaacacataaatctctctctcctttttttttttttctgagacggagtcttgctctgtcacccaggctggagcgcaatgggcgtgatctcagattttcctgcctcagttacctgagtagctgggattacaggtgcccgctaccttgcccacctaatttttgtatttttagtagagacgaggtttcaccatgttggtcaggccggtcttgaactcctgacctcaggtgagccacccgtctcggcctcccaaagtgtcgggattacaggcgtgagccaccgtgcctggcctaaagcatatatattcttatattacacattttaaaatattttgataacaatatttcaatgtaattggcttcctttgtaatctgatatattttattttatgcatttaaaaatattcttagagggagtctataaggttaacaatacaaaaagtgcaagaatccctgcactagatcaggaatggccagtactgacctgcctgtgcttatggcagacattatgaatcaatcatggcagtctttctagcagatgccagatgctctctaggcattttctactaacttgtctgcggagacatatgaggtcaaatttagctgcccttcctggtctataatgaaccaatgcaggataaaacaaggcaggataaagatatgattaagtgcttctttggcaagcacagcaaattagagcaaagtttgagactaagtgtgtcaaaggagttggaacaagaaacccttcacagtgaggtagacccacagtcagggatttaaagacatgattttgagaggtggaggaaggagggtgatggtattcagggtaggggcaggggcaatgagaggaggaaagacttatataaacaaaggtttgaggatggaaagaacaagagatttcaggggacgttgtggcaaccaggtttcggagaagttgtgggaaatgaaactgagagagcaacttctttaggaaggtttgaatatgaagaattttgcctcagaagtccttaagaggacttctgtgaatagaggacaaagggtgtaccagtttgcttttaccgtgcaacaagccatctcaaaatttagtaatttaataccacaaccatttattatttcttactcatttatgggcctgctgggtggtccttctggtctgggctggcttagctgatcatggaatttcctcatgcatctgcagtcagctgattggcagggggtggaggggctggtggattcagaacagcctcatcatatggttggttggcctgactgttggctgggccaatgggggtgcctgggccacatggtttctcatcctccagaaagctagcctgggcttacttacatggtggcaagacagatttccaagagaagaggaaatgcatatggcatcttgaagcctaggctcagaatgggcaattctaccacttcacttctaccgtatttgaactgccaaagcaactcatgaggccagcctagattcgaggagtaggagaatagactgtgccttttgatgggagaagatacaaagtcacactgcaaagggtgtggttacaggaagaggaatcactgtggcccacctcctttttttttaagagacaagttctcactcccagactggagcacgtggcataatcatagctcactgcagcctcaaacttctgggctcaagtgatcctcccactccagcctcctgagtagctgggactgtaggcataccaccatgccccagctaactttttaatttttatttttgtagagtggggtcttgccgtgttgcccaggctggccttgaactctggggattggggccacttttgtaattagtctatcctggagggtttgagggcagctgtggaacatgaaatactaggagaaaagccccagggacggggggctggttgggaaacaatgacagtagtgtttgggaagatagggataggatgtttgcccagactctgagatggggtaggcctgaggtggcgaacaatagaggggatggggaggaaataggtatctgaatttggggcctgtgggccaggcaaggaacataaccattcgcagaactggagatgtcagcaggcggctgatgggatcaaggcctgtctgatgtggagtcctgcactgagaaggccttgaggccttggcagacggcagcccaggtgtgcacctgagtccagaggcctctgctacctacaggctgaaaggtcttgtgaagcccattagcatttcctgcactcactaagtgttctgctatgcagagtaggggtaggaatgcgaaccttgcagggctgggagggagtgaaatagggctcactgtggcgaagcattttgtaaactcttttggactgtacactttttagtggttttatggttttgttttaaattgaagagacattagccacacagatgagggacctaggaggaaatgtgaagggagaagaggaggacctggggttctgtttgtgggagaggctgcaactgttaggaggccgtgggaatagaaggatccagaaacagagagggcttggcttgtacagagtccctccggcttgaggcatggggagttcaggacagcagcagtggggggcattcagtcatgactggctctgtgcttgcccagtccttggggtcagagagttgggagtcgggtggtgggaaaattagtctccctgcctagtcctccaattgcaaagtcctgggtggtctggaccgacgtcagtgcagctccccactcctccctcgctcctccttcttgctgctctgaaaagtccagcagagtcactgcttccagatgtggcctccagatgtggcctggagtttttccagaggatcaaggatgcagaggcagcagcccagctcctggcctttctttctccctccttctccaatggggcctgcccattgctacccctccgctgacttctcttccaccactaggtcaggtaccaggtacccagaggtcctggcagatagataaataccatttataaataaacctgagccagacacatacatctttattcgtgttggaaagagtttacatctgggggagtggagacctctccaatgtttccgttctgagcagtcccagcggctccagaaggaggaagtgagctgtctccttggctggggacccgccagggcactgggcttcgggccagccagggcctgggaggagctgctggaaacctgccccttaatgggaacagcctgggccctgatgtctcaccgggacagagccccagttaggggggaaaggcagctgttttattagtagcagaccatggaaaccaggtggagctgctacaagtgagttctctggttgcctggatcggtgtgtcacagttagtaacgcctgcgctaattccctggggctcttgttaaaaatgcagattttgactcagtttatctggagtagggcctggggttctacatttctaactagttttcaggtgattctgatgctgctggtctgtggactacattttgagtaggaaggttctagactggacgtctaaaacatgcctctactttcctctatttttttgtgtgtgtacgtttctgtattttttttgtacacattttgtattttctgtagcttttcctgttttttttccccagtctgtttttaattcaaaaagtaccaaagagtaggtagtgaaaagtctcctcatatccctgcccccagcaacccagccatcccttcccatggccagccagtgttgttgtttttttgtgtacatcctttaagagacattttatgaatatacaggcaaatatatagttcctcttctgtctccctgccctgttttggttattatctgatgtgtactagtacacatctttctttattatgcaacgtaccttggagattgcactggctccttctttttttttttttttttaatttttcagatatttttcagtgatggatttcttttttaaagttgcacagttttattatacaccacaacttaccaagcagattccttgttgatgaatacttggttttgtccaaccttttgctcttgtgcagtacatatattaatcacttggcaaaggcctacaagtggaaatgcagggtcaaagagtctgtgcatttgtaattttgatgaatattgccaaacttacctccccagagaggttgtgctaacaacatgtgagagagagcctatttcctgtgctctcccaacaccgtgtgttaacaaacttttttatctttgccagtctcatatgtgaaaaacggtaactgctgtttttgaaactctctcttccttcagcttccatgactctcttcaacaatatatttgtcagagggtcactgcattcgtcttctctgggccagccaacttatcagcactggggttccgaagaagaccaacactaataatccttgctcttgcctctggaagggaagacaaaaaaattaatttgttaatgatgaccaatgaatgggatgagagctatgataagggggtgacttcttaaggcagcacttcttacacctcaatgtgcacacacatcaactgaggaccttgtaaaaatgcagactccgaatcagcaggtctcgttgtgggtctgagattctgtggttccaacgagctcccaggtgaagaagttgctgttggtcccaggactacattttgggtacctaaaacaagggctggcaaactttttctgaaaaggacaagagagtggatattttaggtgtcatgggccacatgtgggtctctggtgcagttattcaactctgcctttgaaagcaactgtacgatatgtaaatgaatgggtgtggttgtgttccaatataattttatttacaaaacagctggctgtgtttgctgacccttggccataggcatccaataaataacctattgaagcaatgagtgaacgatgtcattgggcagtagtaggggcctgagctaatctaggggtcaggggatacctgaaaaaaaggcatatttgtcagagtcctacggggaaaacaaaagccaaaagccaatgtttaaagaggggtaatgacacgcagggaatgggttacgtgggtaatggaagagctgagaagttacttagatgcaacccagagattagcaacagcaggaagctgttaccaatcaccctgggtaggatgaggagagcggtgaggagctctcagatcaccacctgctaggactggaaccatggtggatgtacctactgggagcttggagccctggatagacccagctagggtcagagactcttggaagaatctcatttcttcctgctctttcatcttccaccttttggtcaaaatcagctgtcatccagtctatacaggaacctgcgggggccaacctctgccctctagctcagagcaggggcagtcaaagcatgatgtgaggccaataagcctaggcctaagggatatttagagtgactgtgaaagtgtaggtagttgaccaggcataccagggagggagggagggtgtatcagacacagaggacaggcttagggtgtgtaggggtgaatggtgtgggatgaggctggtagggaggccactcctttaagcaggatgagatttatgctttagaacagaggctggcaaacatctctgtcacacagttttctttgttttgtttaaaaacaaatgtaaaaactgtaaaaaccattcatggcacataggctacacaaaaacaggccacaggcagtgtttggttcatgggctgtagtttgccagcctggttttgaaagatccactttagagggatggattggaacagacaagaggctgagagaggcagaagggctggagaggagactgctggagctaccaggtgggagacgatgagagcccagttgttggtcatcatagtggacagaagggagggacttagaattgtagaatgcacaggacacagaattagctggtctcaacaaaaggtctaagcctggtctggagggatgtgcaattgggcacattgactattcctctgattagctcggaatcccttcatcccttgcttcagggagacagagggaaatcctgtcatcctggagaatgaaattcactatggcccgcctttcccctccccagtcctctctttgggtggaatgcatggaggagcaggttgcactgcctctcactaaaggaggagttgggcactcagctgttggtgactcacatgttgctcattctagaatatgggtcccaagcatctcctgacctcagtttcaggccttggctgccattccaggacaacagaagaagtcccaccaacatcctctgacactttcttgtggagtttcctgtgggtccagagtagagataagggctgggaagaccctcacccagccctgggctcaaacacctgctggtagcctctgccatcatctcgatcacacacgggctaatggtgttgcgacagggctgggatgatgtcttagtttggactgccctggaggcagaccgtgagacaaggctttgaacacaagtagttctgtgaaatggggaaggaaggcagcccacaaggggtgtattatcaagctagttaccactgtgggcaactggagttcagtcttgcgggggaaatctgggcatcagagtagaacacgtgccccagagttatcttgcctgaggagtgagggagctggggtatttatccatcaactcctgtgagttatagctagaagaagggctctgctaagggttgttaattccctggcacttccagcatgctgcctggccttctgcagtttaggaaagaaagctctcaggtgcagacatgcagattcacaggtggaaggcagcgggagctccctgaggtggtgaggcctcaaggagtgagcaggatgcctataggatccactatcaatggttatcatctccacttgacagatgggggaactgagaagcaaagtgacagtcccaaatcacactgcagtttgtgacaatgaggggctggagctcagagcatgtgggtccagggtcttccactattttttatgccgttgttatgaatcttctgggcataagaggacctgcccttggtatctcataggctgactctggttgccctacatgcctgcctgctacattgtctcccctgatgacccccacttcctgggtctacccagagtccagagcccaaagccatacctgcaggaagggaagcctgcaggacatgcacatgtggcaaggcttggcttcttaccaagtgtaagactatgtaagactcgcagagcatggggaggagggtaagcaggagacagggtggggtggggagctgggaggtggccaacttgtcaagctgtgtgggaggaaggcgtgctgagcagaggtagacagaacaggactgagccagcatggagggcagtccagaggaccgaaaggtgggctgggcaagtctgagccccctgccccttgcatggttagttgtgacgtgggactgtttgcatagctgggagcagatgtctcaggcctcagcactgaaggctgtgtgtgttcatctaggaattacttatgggggccccgtatgtcccagctagagtgtcaacaatcttgggggacacgtgggagaattagacatttggttgctctcagaacctgttgggtcctgtagggggaataaaacgcttcctccagcctatagggtttttcgtgtttttgcccagagacaaggtcttgttctgttacccaggctggagtgcaggatcctatctcactgcagcctcagctctagggttcaggtgatcctaccgcctcagcctcccgagtagctgggactacaggcatgcaccaccacacttaagttttaaattttttttgtggagactgggagtctcactatgttgcccaggctggtctcaaactcctggcctcaagtgatcttcccacctcagccttccacaatgccggtattagagtttccagagccaccatgcccagcctccattctacattgagtcctgagttggatggtagaaaagagcacagcctcaggaagcccctagtttgagggcaaagacatactctcaaatccagttgtgaggttcccccctttctgctcacagagtcgtggaaacagttttcttcccagtctttgataccaaaaaggaggtggagatgactgggaattccacctggctggcccagcagaagctcgatgctcaaaggtggacaccaagagctgcaggttaccctgcccacacccacccattcctaaagccagcctgtggtcgctcatgagcagaggtgactgtgttagtcccctccttgtgccctcatgctttgcaatgtgactttgccattcctcccatcaggaggtggagtgtgttccccaccccttgaatctgggctggtgtattagtcagtgttctccagagaaacagaaccaacaggatgtgtatatatatagaaggacatttattttaaggaattggctcatgtaatcatggaggcttggtaagtccaaaatttgcagagtaggctggcaggctggagattcaaggaagagttgtcatttcagtccaaaggcattcagctggagaattccttcttgctggggggagatcagtctttgttctctgtaggctgtcaactgattggaagaggcccaaccacctaatagagggtcatctattttactcaaaggtccccaactgaactgttaactgcattaaaaaaaataaagaaagaaaaagcaccttcacagaaatatccagaataatgtttgatcaaatacctgggcactatggcccagctaagatgacaacattaaccatcatggctggcctgtcacttgctttgggccatagaatgtgctgacagtaaagctgttgagtcctgcgcctaggcctcaagaggccttgctcaaatccatttgctttcatggaattctgccaagccatcaggcagacgatcttgatttgaaggatgggagactctgtggaacagagatgagatgtaccagctgactccagttcccagccaacctggcagctgactgcatatgcccaaagggagctcagctgagatcaaactgcccaggagagcatggcccaaattgctgacctgcagaactgtgagctaaatcaatagttgttgttttaggccactaagttttggcatgttttgttacacagcaagagctaactgatacacagtctaacttctgcagtgctcccaagacaggtatcctaacagcctgctactcagctgatggagaaaacacaggcaaatgtaggggcaacttgcagctaccataggctctgtgggtgtctgcatccattgatggtatacatgcagacactcttctaccttgatatttaaatgtagctctgccaaacccactctggcctgccaagctcccacaatactgtgccagagcagaggaggggctgatggctggcaactgggaaggctatgtgctggaggtagagggaagccaagggctggatcctggaggctgctgcagtaggcccaggggagttgcagggatggatcataggatggaggacgggaaaagaacttgggaggcagcaaacctgggtcaacttctgcttctgttgctcatcaggcctgtgtcgtgggacaaatcacttcacctttcagagcttccatttttccaagggtagagttaggttttatggggcctgaggctgatacaatttgggagccctcctcaagcagaagaataaaaactatgattacgaaattgcagggctttggaaggggcccatgcaagtgagcttaagctgcattggctttgcagtaaattgcttctggcttctccactagaaaaaatagtagacttaatactgatggaacagaatggttttgaaggtcaaatacattcaccatacatagtgggagtcctgggggtggaatctggcaggaaggcagctttgcagtggggaaagggctcaggcggtggctggtgggtgggctcctgggggagagaagggtggaatgaggagtgtagtggagaaacacagaggggtgtctgttctctcatcgggtctccatgtaactgcccccagggcacacagagagggttgtaggcagaagcaggagctgatttcacgagattctgaggccgaagcaaggttgggacagggttccagacacaaacttgggaagaagggtatgttttcttctctagagtgaaaggctgagctgaggattcttgagcaggtgatttattgagcgagtactcttagagagacataagagggagggaatgaagcaggccagggcagggaagatgctaagcatgaagtggtctcagctggggtctgacttcagcctgatccaggggaagctctggggtgtggatcggccactgagctgtcccccgttggggtaagcaggacagatttttttgcacctctgtgtcaattactttttgggggagatcttagcaatagctggtgggtgggtgcagtggccaaggagaggaatctgggcagggcaccaacagaatccgttacaagggtccttctcccatttctgcgtgatacgcagacctactacggtctcaggttgccaacttggaggctatagggggagaacagatggaatttaggagggtccatagtgctggtcatcagggcactctggcaggggcagtggtgaggtactgcccccaagtggcttctaaggccatagctctctaggaggggacccgtgctaagcagatgtaagatatcccagttattcagaaataactgggataaatcgaggggccctggagcacccttagtctgtggacgggggcaaaagcccataaagtgtgttttccctgttaatgccacctcatttgtgtccataggatggagaaacctggaggagctcggggcacatatgggaacagcctttgttgactctaaagtgtaggatgatttccaaggccatgtacctgatcagctggaggtagttcccatcctgtggaagacatgcatcccaacctggctatggcccattgatcggttcatgaagaagggaaaccaggcaggaggggatggcagtttggtgcaactggggtcctgcagcctgccatgtcctagaataagaggcaatgatatttatctttgctgagatgagttgcagaaaaaaagcacttaaaacttgcctatggtgtcagtgtgaaacggtacaagaaggagggaatcgttgggggccatattggctgatgaccacaggggttaatgcagccatgcctcctctgttacacacacacacacacacacacacacacacacacacacacggaaccttgagattctggtgcactgagtcctgaggatccctggaggaatctgtgtggcggctgcggggccagtggagctgtaacagtggcagtcgctgcagaagactgcactattcatcaagggtctgggcagaggagcagtggtcaagctggagtggtctggtgtgcggcgtggcttggtgcaggttagttagacctgatgcaggggccttcccttggtgatgaggtcttcatttttatgtgccctaaaacaagggcccaggaccctccaggcagcctctcagctagtgtgtcaaggataaaatgaagagtgatgtagaagtattttgatgaggagacatcttcaaacctgaggacttgtccttttctcagcctggagtctccctggcaggggaaggagtgtgtgtgggtctcctctgtgccatgaagccaaggcaatgccagtccccaaattgtggtcacatgaggcctctcctgcctcccaggtcagggagtgggactcaccgttcatctattaaggaactttagtatctggccatgtgctttatgaacaggtcactccatctgagcttgcagggagttctaatttctgggctcttccctaaggagctggctcctaggctgagagtataggtcctcagaccccagtccttcccctatgccaccagctcagtctctagtctggaagacttaggggtatgggggtgtacccctttcctatttctatgagctgttcttggggatggagggaagcaggacatatccatatcctccagttctcaaaggcagcttgtgcttccatagaggaattttggactctcaatacatggattttatttttattatttttttaagagacaatgtgacagcaagaatcaatgttgctttaacaacccacatactcaattatttgactacctctctctgacttgatcatctgttttggaacattgtaaaccactcttggagtcttgctttgtcacccaggctagagtgcagtggcatgatcataggtcactgtaacctcaaactcctgggctcaagtgatcctcctgcctcagcctcctgagtagctgggactataggggtatgccaccatgcctgctaatttatttttttattttttgtagagacacgggctctcactgtgttgcccaggctgctctcgaactcctggcctcaagcaatcctcctatcttggcctcccagagtactggtgtgagcacggtatctggccaacaaatgaattttgagtagggacccccctgcttctttttcatcatcagagcccacttttcttggtgactggttaagagatgaggatgagatgggaaagagaggcactggccctttaaaggggaagccaaggtttgtagcaaagtgcaaattgcatgcaaatggatccgcaaaagagacttgggacccagggacagctggcttggatgaaccaaagggtttttgtgccagtttgcccagccctgagtcatggttccctgctggatgtgagaagaggcactacagctccagaatttctataaaggaggctctgggattgggggtgaggcacaatctggctgggaaggtgagaagctgtggaaagtcacccaactgcctgggagccacgcactttttactaactgtatgttttcagcggatggctttgactctcaacttcctctctaatctgtcaatgtgacagcaagaaccaatgtcactttaacaacccccatgctcaattatttgactacctctctctgacttgatcatctgttttggaattttgtaaaccactcctcccttcttgcccctttaccacctgagttcaactgttctttttatgcctgatggaatttgacattctttccatgtacttgcctggtcctattgtcccaacgaccaatgcagacctcctcctggagctccaggctgaagtagcccggtgtctcctaaacaactcctgtggttgtctcccagggacagcaagctgagcagatctgaaatggaactcattcatggtcctccaacactcagttctctgcaaccagtatccgccattacaataaaatggtgaccccatccaaccagtggacaagccagaaggctgaggtcagcttggacacctcccttaccctcatggccctcatgcaatctatctctaagacgagtcctcttgtctcaaagctcttgtctgacaccttgactacttcagtggcccgtaactggtctccctgctccctctcttactatcctcccagccctccatcctcatctcctccagtccgcattcagaagtcacgtgtctctattctgatgcaattgtctatctgtatgacactggaaaacttgctgccttagttctctattggtcaaagttggtctgcagacttgccaaagaccagaacagatgagtttctggggtgtcatgaccccagggcaccagctgtgttctggatagagagaatcccacagtggggtagggaggcccctagggtccaggaactgcagtgtaagcggtcgcagcagttctgctcccccttggagtcttcagcttccaggtctttgcagcctgcctgagacttcctgccatcaagaaggaagaagtgtttgcaacccacagccaaaacttatgtctgttctgattcctttccccttctccccacataccaaaataggcttactcctttctcaatccagaacttcaaacccaacccagtcttcaaacccaaccgaggctgtcaccactgtgaatgttcatgtattgatttaaaaaaaaactttaaattttgaaattgttagaaattcacagaattgcaaagatagtacagagaggacccatgaacccctcaccctgtttccttcaaagattacatcttaattaactataatataacacccaaactgggaagtgacattgatacaatgtgtgtatagttctatgttattttatcacttgtgcaggtttgtgtaaccaccaccctgccaagatccagaactgttccatcaccatcaagatctctctcttgcaactccttcagtctcaccctcctctctccccaccatccctaagcactggtaaccactaatgcgttctccatagttttgtcattttgagaatgttatataaatcgaagcatacagtatgtgacctttcgtgattttcttttccccactcagattcgtgcccttgagatccatccaggttgatgcatgtgtcaatagtttaattttgggtggtaatctctggtgtaaatataccacagtttgttcaatcattcacttattgtaaaacattttggttgtttccattctggtacttgtgtggccatagccctatttctctgggataaatgcccacaagtgcattgctgggctgtatggtcactttatgtttagtttttaaagaaactgctcaaccattatccggagtggctctatcattttatattttcactagtaatgggtgagagattcagttccttcacatcctctcaagtattcgatatgttcactatttttaatttttagctcttctaataggtgtgtagggatatatcatcatggtcttaatttgcattttcctaaagactaatgatgtcgaggatcttttcatgtgcttatttgccattgtatagcctcttcgataaaatatctcctcatatctcttgcctattttctaattagattatttggtttttttttaactgttgagtttcgagagtctttctatattctgatacacatcctttgtcagatacgtggtctgcaaatattttttcctaggtgtagcttgtgtttttatcttcttaagagggccttttgtagagaaaagtttattcattttgatgaattccaatttattgatttcgatgttgtggggacaagagaggctttattttaaatgctaatccagtgactaaccacaagtccgggaatgcctccaacatgtctagctgatgtattactctttatgtggaaacacctaatgattgtaagtttcctccaaaacagctcttgatgctgttgcagaagtcataggctgtgacactcatagccaactacacattcctttcagagcacgtatacttttcccccaagatgtaagccccctgcctggggaggtgtggtgtagagatctacctgtcttgtggtggcccaagaccagacttctgtctataagttgcccctaataagccaccttatactgacaaatgggatttgcctgcctccttctttggtttcttggcttctttggcatttgaggactgctttgcatgtgcggccctttcatggaacaggtgtcatgtataagaactcttcactaagccctaggtcctgatgatttttatgttttcttctaaaagttttatagttttatgcttttttttttttttttttttttttttttggtgagacggagtctcgctctgtcacccaggctggagtgcagtggtgcgatcttggctcactgcaagctccacctcccgggttcatgccattctcctgcctcagcctcccgagtagctgggactacaggtgcccaccaccacgcctggctaatgttttgtatttttttttttagtagagaccgggtttcacagtgttagccaggatggtttcgatctcctgacctcatgatctgcctgcctcggcctcctaaagtgctgggattacaggcgtgagccaccgcgcccagcagatataattcttctttagcctattgatatgatgagttacagtgatttatttttaatactgaacaagccattaatacctggaataagcctcatctggttataatctctctctttaatatgtttattatacataatgtgtatatgtgtgtattttagtatattgctgaattctattagttaatattttgttaaggacattttcatctgtattcattggggatattggactatggttttcttttttgtactttgccttgttttggtattagagtaatattggctacataaaatgaattaggaaacatgctttcttcttctattttctggaagagattgtgtagaactggtgttaatttttctttaaacatttggtataattcgccagtgaaatcatcagggttgaagatttcttctttcattttaatagtcttaaaaatttgaattcaattttccttagagtgaaagggctactcaaattattcacttcatattgggcaaattgtgcttgtttgcggttgttgaggaatttgtcaatttcattgaagttgttaaatgtatgtgtgtagcgttggtagtattatcttattctttttttaatgtctttggggtgttcagtgataacaacagatacctgtttctttcctgaaattcgtaacttgtgttttctttcttttttcttttgtcagtcttgctagaggtttgtccatcttattgatcttgtcaaggaatcaactttttgttttattgcttttctatattgttttctgtttttactttcattgatttctgctcttattatttcctgatttctgctgaatttgggtttattttgctcttctttttctagtttcttgagatgggagattagattattgatttgagttttttcctcatttctaatgtaaacatttagtttcacaaattcccccttaacactgttttaagtgtgtcccacacattttggtacgtcgtattttcattttcatttagttcactgtattttttttaatttcccatgagcctcctctttaacccaaggattaaagtgtattgttttatttccaagtgtttggagattttcctgttacctttctgttatttgttccatgtggtcagaaaacacagtatgattcaattcttctacatttgttgaggtgtattttatggtccaggatatggcctatcttgatatatgttccctgggtgcttgaaaagaatgtggtttctgctatttttgggtggagtgttctataaatgtcagctggattctgttgtttgatggtattgttggtgtcttctatatctttgctgattttctgtctggttgctctatcaattgctgagagaaaaatgaattctccaactacaataatgcatttgtctatttctcttttcaatttgatcaagtttggcttcacatatgttgcagctctgttgttttgtgcatacacatttaggattgctatgccttcttggtggattgaccattttatcattgtagaatggccttggtaattttctttgctctgaagtcgcgttgtctgacatcaatatagccactctcgctttcttttgatttatgtttgtggtgtaaaactgatctttttaatttttaaatttaaatttaaatttttatttagagacagggtctcactctgtcacccaagctagagtgcagtggcacaatcatagctccctgcagcatcaaactcctgggctcaagtgatcctcctgcctcagcctcccaaatggccaggattacaggtgtgagccaccacgcctagccatcttttaactttcaatttacctatattgttacatttgaaatgagttctgtgtagatagcatatagttgggtcatgttttaaatcctctctgtcaatctctgtattttaattggtatgcttgggtaaatttatatttaatggaattatttatatgttaggaattaagtcagccattaaatttttaagttttctattgttctctttgttttttctttcctgcctttctacgggacacttgaatgttttcattcattttgatttatcgatagtgtttgtgagtgtatatctcttgtatacccttttcagtagttgttctagatatatagctatctatatttatatctgtctattcaaatatctatctatattcgtatctctgtctctgtatgtattcgattgtggtcagagaacacactctatgtgatttcaaatctttcaagtcacactatctatgagtattaacatttaactagttcaagtgaagtgtaaaacctaccttcctaacatcgcattactttcttccatttctaatataattgtcttaaatatttatatttgttgagaaccacatcatacggtgttataatttttgctttatttatttatttattttttgagatagagtcttgccctgtcacccagtctggggtgcaatggtgcgatctcacgatctcggctcactgcaaccttcgcctcccgggttcaagtgattcttctccctcagcctcccgagtagctgggattacaggtgcatgccaccatgcccagctaattttttatatctttagtagaaatggggtttcaccatgttggccaggctggtctcaaactcccgacctcgtggtccgcctgccttggcctcccaaaatgctgggattataggcattagttaccacgcccggcctttttttttttttttttgagacgaagtctcactcttgtcgcccaggctggagagcaatggtgcgatctcggctcactgcaacctctgcctcccgggttcaagtgattctcctgcctcagcctcccaggtagctgggattacaggtgtgcaccactacgcccaactcatttttgtaattttagtagagacggggtttcaccatgttggccaggatggtcttgaagtcctgacctcaggtgatccgcccgcgttggcatcccaaagtacattttttactttaactgtcaaacataatttagaaaaatcaagaggctcatgcctgtaatcccaacactgagaggccgaggcaggaggactgcttgagcctaagagttcaagaccagtctgggtaatatagtgagaccccatcactgtatctaaagaagaggcctggcacggtggctcatgcctgtaatcccagcactttgggaggccgaggcaggtggatcatgaggtcaagagatcgagaccatgctggccaacgtggtgaaatcccgactctactaaaaatacaaaaattagctgggcctggtggcgcgtgcctgtagtcccagctacttgggaggctgaggcaggagaatcgctcgaactcgggaggccaagatcacgccattgcacttcagcctggcgacagggcaagactccatctaaaaaaaaaaaaaaaaaagaaaggaagaaagaaagaaagaaaactcaagaggataaggaaagtctgttgtatttatccatatttttgtgcttttcattgttctttcttctttactgttgttctaagatccttcattcagccaggtgtggtggctcacgcctgtaatcccagcactttgggaggtcgaggctggtggatcatgaggtcaggagttcgagcccagccttgccaatatggtgaaatcccgtctctactaaaaatacaaaaaatttagccgggcatggtggcgtgtgcctgtagtcccagctactcaggaggctgagacagaagaatcgcttgaatctgggaggcagatgttgcagtgagctgagattgcaccactgcactccagcctggtgacagaacgagactctgtctcaacaaaaaaaaaaaaaaagaaaaaagaaaaattcctttgttcatcatttcctttctgtttagacaacttctttttagtcattcctaaatggcaggtgctgacaacaaattctcctggttctcctaatctgagaacatctggattcccgtcattcttgaataatctttttactggatatagaattctgggttgagagttcctttttttcttttcagcactagaaaagaaatgtgccactctcttctggactttagggtttctgataagaaatctgacgtctttccaattatttttctcctgtaggcaatgcgtcatttctctctgctttcaagacttttttttttttttttggctttagtttttagaagtttggccaagatatgttttgatttgaacttcttggggtttatcctgtttgagtttcacttagcttcctgaatctgtcggttcatgtcttttgtcaaatttgggacatttttagccattatttcttcaaatactttttcaaatgtagatcctttcacctctccacctgggtctctagtgacacaaatgttagatcttttgttacagcctcacaagtctcttgggttctgttcatttttttctctactattttctctctgttgcttggattgggtaatcttattgttctattttcaagttcactaattctttatgctgtcatctctattttgctgttcaatccatccattgaattttaaattttgttgatgtatattttggttctaaaatttccatttagttctttttttttttttgagaaggagtcttggtctgtcgcccaggctggagtgcagtggcgcaaacatctcggctcactgcaagctccacctcctgggtttaagggattcttctgtctcagcctcttgagtacctgggattagaggcaggcacccccacgcctggctaatttttgtatttttagtagagatggggtttccaccatgttggccaggctggtcttgagcccctgacctcaaatgatccacccgtctcagcctcccaaagtgttgggattacaggcatgagccactgtgcctggcctccatttggttcttttttatgtctcctgtttctttgctgagacccacgactttctgttcctttgctgagactttctatttttgtgtgtttttttcaagggtttgtagttgctcattgaagcattttcatgatggctgctttgaaattcttgtcagacaattctaatatccatgtcacctaggcactggtgtctgttgattatttttcctaattcaatttgaggttttcttggttcttggtttgatgagtcattttcaacggaaacctcaacattttgagtttctgttgtgagaccttggagcttctttaaatctgatttagcagaggcctcctctgacttgctctagggaaaggggctgctactttgttcctgtcaggtgaggtgaaggtccaggttccccactctgcctctgttgacagtcagggtcagggaaggagcgcctcatcactgttgggcagtgggtagggttcaggcttcctactaggtctccatcgacaacaccctggctgggaggggcagagttcccttgtcactgcttcacatgtgacctccactgatactgtggggaagcaggatagccttgttaccgtttggcagttgcgaaagtcctgagtctccaccaggcttcctctgagaccactggagagggggcgggggagaggaggggggcgggggagaggaggggggcgggggagaggaggggggcgggggagaggaggagggcgggggagaggaggagggcgggggagaggaggaggggtgctccgttaccaccagctgggaatgaaagtccaggcttcccatgtggtctccactgacacccctgggaagggagacctcattgctgcccagcgggataaaagtcctggcttcccacccagctttttctgacactagcctggccagggggaaggagattgaaacctcatgatagcctgaagccgtgaagtccagcctgagcctagccatgaagccgaggctccccactcagcctttgatggtgcgggtgggggtggggtcttacattttttcctatggtatttggctggcacagaacgatcattgtctaaaagttttctgttttgctaggccactccatcttggtcctttggcaagcagagcaggattttcttgggcttttgtggggcatctattcccattgttgtttccagaatgctggcttctttgcacactgtctgggatatatgagccaaaaagataaacccagagaactcattgctgtgtcattccctaggccccaaagtccctagctggtttgccttcttctctctgctttcagatgcttgttttataggcagtatctagggtttttagccatatttactggaaagaataggaaaaaacacatctactccatatttctgagagttgaggtgtcataggttgatttaaccatgccactgatgcctttagctctatctgccatgcagcaggtatcttctaggtccttcatggggaccaggcactagttgaggccaaagaggagacaaagactgactctgacttcaggagctcacagttttgcgggaacacaggactttgccccaggtaagcttggatagtgaagaataagatgctatagaggaaggaattacttgaatggcctggttggggagagcttcctgggagggtgaaagtggagatagagtattttggtaaattttagagaggagctgcaggaagtacaggtgccaggagaggagcagaggtccagaggggtaagtagggatggcaggaggcagcagggagagagcttgcctggttgggccctcaggtgaagcgaatgagcctgaaggacaccatgcacaggggcttgacagtagtatcttcagaacaggaatctggggatcaactgtgacatggcaattgtgtgggtgagcaaagatggtggcctggccagtgcagtggctatggggtggagaggagagaacaggatcaagaggcatttagaaggtagaactgatgggtgtctggattgatctggggaagaaagagagaggaattagatatgaggctgagatttccagctgaggtctctggggaagaatggtgccataaacacgcagagagagaagacagagaggggaaccaatctttggaataagaggatgagattttggccactggtacccagaggcccttcttcagagaatgatgcaatgagaccgaggtgaatattttctctgagcactgaagtttcagatcaaataagcaacagatttctgctctgtgaaagccctgtagtcgaaaggcagtacattgcaaatttcaaagaataaggcactatcctctacttttgagagaaagaaatggaagtcacacgccaaaaagttgaagtctctcctagactcagatgtcctcagtcttcatcactctctctgggtctgatggtcaggaggcctaatgctcaagctgtaaggcgaggctccttagaaccacttgagtcacctgtccgaagctgaattgcatgatggcttcattcagagccacccaaatcattctggccaatcacgggcaactgtggatggttcaatggcaccttcctttcagagaatagaagtcccaggagggcaggggtctttgtctgatttgttcactgaagaatcccaggtgtctaataggctgctggtatatagtagatgctaaataaatactggttaaataaatgaaggattgcaatgggtttgggggaagtctgaggccagggttaggggtcacaccaaggtcaggtttttaaagtataggatcccatttttggtactgaaacgtggttggggtatttaggggtctgcctattgggacaaaggtttcttggaggacatcgcacacctctcaacctgaggactccttatgggctcaggggagcagctactggctgagatttttaaagcagggtctcagtcagtgaaagcctggcttgctttccctgaagagagctatgcgcgtgcctggccatggggctcacagctgccccctggtggtcagccacagccccctgccaacccttgggcgtggtatttttccagccttaagtcaggcagcaacggcacatcctaacgcagggtccgtctggttcccgggccccaggtggcgagggaacaggaatgagggctctccggcactctccgctttgcccttggcctccttttttcatcagggaagactcaggggagggcctgcgctgtgcctctcttcagcatctgtgaagattctgccagctccccagccccgtgctctccgagggcatttttgtgcacgcagggcagattccggattccaagaacatcagtcatggaatgacctctctccggccccttggtgtgacctcactgtcttgcctcctccacctgcacgttctttgccagcctgtaggtcctatcgtggggactcctccctgacctctgccaatttgaagtgggaactcagatgagtgcctctgactttttttttttttttttttgagacggagtctcgctctgtcgcccaggctggagtgcagtggcgcgatctcggctcactgcaagctccgcctcctgggttcacgccattctcctgcctcagtctcccgagtagctgggactacaggcgcccgccaccacgcccggctaatttttttgtatttttagtagatacagggtttcaccgtgttaaccaggatggttttgatctcctgacctcgtgatccgcccgcctcggcctcccaaagtgctgggattacaggcgtgagccaccgcgcccgaccgagtgcctctgactctcacaagggctcgtgtcttcagttccaggcaggccctggaagggcatggggcaacatctggggcgcccccacggctgcctctctctccccccacggccctgtgcccctcagcaaagcttcttcagaacagctctttggacagcagctctcagggcatctgtagctggtgccagcctacaccccccatgcagctatcatggacagcgagggcataggctctggccataggaccccacaaccagcaccaccatgttctgagttaatggtgggaatttatctcccagcatgatctgacatggtctgacagcaagcccatgacattctgcctccatggtgtggacacctgaggcagatgggttgtatgtgggtggggagatagcccctttcatcgcaggcaggaggaacatgcttagggtactacgctgtagggtcaggtctttatgcttctcatcatgcagagcaggcttaggggctgtgtctgcagcccctccctgattcccagggatgaagagatggggtaggctctccgcagctctggggaagttttattccctcttctccccctctctctgcacttccttccctctcttgtgttccatcttagtccatttctgctgctataactgaataccacagactgggtaagttataaagaaaataatgtatttggctcacggttctggaagctggcaaggccaagagcatgacgctggtgtctgactgatgaagacttcatgctgctttatcccatggtggaagatatcacatggtgaggaagcacatgtgtgagacagaaagaaaactggccaaactcatccttttatcaggaaaccactcctgggataactaacccatttgactgataacggcattcaccaaccttttaaaggccccacctctcaaccctgctacaatgggagttaaattccaacatgagttttggaggggacattcaaaccatagcatgtccccacctgatccatgcgcattctttgtagaccagtggtccccaaactttttggcaccagggattggttttgaggaagacaatttttcctcagacggggtaggggggaggggatggttttgggatgaaactgttcgacttcagatcatcaggcattaatcagattctcataaggagcgtgcaacctagatccctcacatgcgcagtttgcagtagggttcgtgcttctatgagaacctaatgctgctgctgatctgacaggaggcggagctcaggcggtaatgctcactcacttgcagctcacatcctgctgtgtggcccagtttctaacaggccatggatcagtactgcgggagctggagacccctgctgcagaggatctgactctttttggccctgggagggagtggttcacaaaagaaaaagaaaattacaatagtcccccaccttattggcaattttgcattctgcggtttcagttagatgctgtcaatcacagattgaaaatattgaatggaaaaattccagaaataaataattcatgttttggccagatggggtggctcacacctgtaatcccagtactttggtaggctgggacgggcagatcacttgaggtcaggagtttgagactagcctggccaacattgtgaaaccccttctctactaaaatacaaaaattagctgggcatggtggtgtgtgcctgtagtcccagctacttgggaggctgaggcaggagaatcgcttgaacctggaaggcagaggttgcagtgagccaagattgcacccttgcactccagcctgggtgacagagtgagactcagtctcaaaaaaaaaaaaaaaaagaaaaagaaaaagaaaaagaaaaccaaaaaacaaaatgagcaactcccattttaaattgcctgccatgctgagtagagtgaatcatccctctgtccagcacgtccatgctgcatattcttcccgctcattagtcacttggtagctgtcttggctgtcagatcaactgctgaggtatcgcagtgcttatgttcaggtaacccttacttcatttaataacgacccctggatgcaaaagtggtgatgcttaacatcatcacaacataattattattaacaataataactgagaataaaatagaacagttgttataattgttctattttattatcagttattattgttaacctcttaactgtgcttaatttatgcattatactttatggtggatatgtacatatagaaaaatccatagtatgtatagggtttggtactatctgcggtttcaggcatccactgggggtcttgaatgtatcccctgcaaataaggggggggactagcgtttctgtcttcaccaggcctagatgtgtcttgcctgccgaggaaagatgtatagttaagatgtgacaattatctgtcagttggtggagtttcacccacttagttggtcttcttactgtattttgagatatctttatttacaggaggcaaaatagaggtcctgggtcagtcctcagccctccacccccagcctttatgcctaggagactttgagttgatggggaaagatggtttctgcccttgggggacccacacagggtccttagtatagagcctggcgctccacagggacccggtattgaatatgggatggagaggagcaaagagatcctgccagggaggttgtaggaagatcaatgggtcacagaagctacagaagggcacacagtaaggccgtgagagtgggtaaaaaggagtgtgggagctctcacctgctctgtgctgggatgtgggtactggtctcctgggagtgagcagttgggccctcacccagttggagggcccaaccacaaccacggcaaatcccaaaggccaggaacagggactaatgtggggtccagggataaaagcagatttctgagatacagaaagcccagggtctggcctaaggggcagctgatatgcccaagagcaagttcaagggcagagcaagttcgagtgtactgcagacagccttgggacagggacatccaatttcatgggccaaggagaacagtggaaagtccaggtagtcaggagcccttgaaagtctagagggtggtgggcttggttgggatgtggatggacatatatatatatgtatatacatatatacacacacaccatggtgtgtgtctgtgtgtgtatatatatatatgtgtatatatatatacacacacatacctgatatgttatacctgacatatgttatatacatacatacatatacatatatacacacacatatatatatctgatggttttatatatatagggaggtgtgtgtttgtgtgtgtgtgtgtatatatatatgtgtatatatatgtgtatatatatgtgtatatatatgtatatatatgtgtatatatatgtgtgtgtatatatgtatatatgtgtgtatatatgtatatatgtgtatatatgtatatatatgtgtatatatatgtgtatatatatgtatatatatgtgtgtatatatatgtatatatatgtgtgtatatatatgtgtatatatatgtgtgtgtgtgtgtgtgtgtgtgtatatatatatatatatatatatatcagtttgcccttgctggataacaaaccaccccagaacttactggcttaatgcattaaccatttattatttctctaggcttttgcaatcagatgctgggttggctggaagctggctggtatagcgtggccatgcagcaggctagtctaggcttagtcacatagtgattgcagggtttcaggaaaacaaatgaaaacatgcaagatcttataaggtctttacttggaactgacagactgtcacttctgccaaactcttttggtcaaacaactctcaaagccaagcctcacttgaaagagtttgggaaaaagttctgattcttttgtttgtttgctttagagacagggtcttgctctgtcacccagactggagtgcggtggcgtaatcatagctcactacagcctcgaactcctgggctcaagcagtcctcgcagctcagcctcccgagtagctgggactacagatgtgagccacagcacctggcaaagttctgcttcttgatgagagatgttactaaatcatattgcaaagggaggggtggagaattgcggccatttttgcaatcaatctaacgcaacacccacttgtgaaagacagaaacctgggtgacatcctgagtccttcctcccacttctccgacatccgttacctcaccaagccaatttgattttcaccccccaaaacgccattcaacttttcctattgccaccaccccagtccaaggaacttgtctacctggtctactcacatttgctgtagctgtgctctactatcgtggccacatagcagcctataggacttcttcaaagtacaagccaggtcccatcatttctccctgcccatacccttcaaagactctgtattagtccattcgcagttgcaagcagaagaaacaggctctgattatggcaaaaaaaaacacaaaaaaacaaaaaacctaatggaagggtattgattagctcacagaatatcttgaagactggacccagaaatcacgcaggcaccaaaggtagcagctggatagccaagaccacgatgaaaaccatgctgctggaacatctgggggacactgtggccatcaccaccatgtagccaggccccaggatgctgctgctgccaccactgccaggatgaatagttcactgtccttggcttcttgtatcactcactacaggctcaaagagctgggtggaagcatctgattggctaagcctccagtttccatttcatttctgtgctgactcggtcagtggaggattcctaggaattcccaggatgaggaaagatgctggaaattcagttgttctcaacctttactgtgttttgcaggttcccaaagccactgggggctgggtgggtatcttctctggcacatggcatttctgctgtaataaaggttcttttagttaaaagtcacaaaccccttatggtgtaagtgataaggtggtggggatgggacctttgtttttgcaaagctgtaaagaggaaaaagttagtctgggcccctgaaggaaaagacatgaatcattaagtgaagagcatggctgaatccctgcgtcatcagggagaaaccagaggaggcaaatgtgtaagaaagattcccctgggcctgggaaggggagccgacagaggatcccagctgcaggaggtcgggcctcaggaccccttagaacttcatggactgtcccagccaatgtgaaaaccctgggccatgtctgttcttacccgggaaagaggaggagagaggctggctggggtcagcagtaaaccgataggggactgaaatggacactgtgggtgcctcgcccagacccctttgcaggatagggtgcatctgcggctgctgtgcctgttgggtcacaggggccttctctcttctctagggaattgccctttgcccagtgggagtcacgcccactcccacagcctgcagcctgtggatgactgacatataagccctgctgccttgcaaccaagtgaatcttatctgaggtgccgcgacccagtgtccttgtggggtcagccaaggctagatacatttctgcccagcagtgggggtgacagcggcctctcctaccatgctgtgaaggcgagggcaagggaagcagctgccaggctcccggggcctcccttatctcagcccctacccacccacccaagtccagaatcggcctcacacctgccctggattccacttcctccctgctcttgggagccagagaaaagatgtcccaggcccgttgactctctttcgccctctcgtgggcccgctgagaacggtggtgattcccatagaatttttccctaggctgcttgtccaaaagcggcccgttgggacttaggaaaggagggagaagggatcagggtgataattcgtagctggtgagattgaaggtagttttccaagcaaagggtttgatggttttttttttttttttttttgagagagcgtcttgccctgttgcccaggttggagtgcagtggtgcaatcatggctcactgcagcctcaaactcctgggctcaagcgattctcccaagtagctgggaccagaggtgcgtgccaccatgcccagctaatttttaaatttttcgcagagacggggtctccctgggtttggtggctttactggggggatgtttggtagtcttccttaggaaaccttggcatcatgaaggctaggccaggaagctggtctgaaggggctgcttgatgctgtgactgatttctgtggccttgagccagccatcatgtctttgtcaagtagagagaatcagacaaggtcctgtagcctggaggtaatgggtgaacttaaagtgtaattacacattcaagagagcttcaccatctcaaatcacactgatcttgccgcctattaaacttccaccagacttctcattttagctatgcaatcttgtatttgattatctattttctttcctgtatatactccagcctcttcctatgggtctttctgcttccacactgcacattgcaaccagaactcactcactcaacaccatttggctatgacactaaaaagctttcaagaatttcccactgcacttacagtaaagtccaaattatgttccatggcccccaaagacctgcacgggcaaggtgtggtggctcacgcctgtaaccccagcactttgggaggccaaggtggttggtctcctgcctcagcctcccgagtagctgggattacaggcatgtgccaccctgccttgctaattttttgtgcttttagtagagacagggtttcaccatgttggccaggctggtctcgaactcttgacctcaagtgatctgcctgcctcggcctcccaaagtggtgggattacaggagtgagccaccacgcctggccttgtgtgtcttcttgactgggccatggggtgcccaggtatttgatcaaacattgttctgggtatttctgcgagagtgcttttggatgagattaacacttaaattgttagaccaagtaaagcagattgctttccctaatgtgagccctcctccaatcaattgaaagcctaaattgaacaaaaaggctgaccctctcttgagtaagaaagaattcctcctgcctgattgctttcaaactgggtcatcagcttttttcttgcctttggacgtgaacagaaacatcagctcttcctgggccttgaaactgctggtctttggataagaattacactattggttctcctggttctcagggcttcagacttgggctagaatgaaaccatcagccctcttgggtctctggtttgccaactcactctgcagatcttgggacttgcctatgtataggagatatatatgtatatatgtatatgtatatctcctattggttctgtttccctagagaactctaacactcaatagtattctcatgattggtttaaattagtgctggccaatagaaatataatgtgagtcacatgtgtaattgacagtcttccagtaaccatattaaaaacataaaaagaaagagatgaaattacttttaatagtgtattctaggccaggtgcagtggctcacacctgtaatcccagcactttgggaggccaaggtgggctgatcacctgaggtcgggagttcgagaccagtctggccaacatggcgaaatcctgtctctacttaaaatacaaaaattagctgagcgtggtggtgcatgcctgtaatcgcagctactcgggaggctgaggcaggagaattgcttgaacctgggagatggaggttgcagtgagccgagattgtgcattgcactccagcttgggcaacaagagcgaaactacatctcgaaaaaaaaagtgtattttatttaacctaatatattaaaaatattattattttgacatgaaaccgatatacacatgattaagttactaaatattaaaaatatgctgtgcattttattctaacagcacatctcaattcagactagtcacatatcaaatgctcaattgccacacgtggttagggtctatcatattggccagtgcacgttaagaccaatcaagaaacattacatggggctgggtgcaatggctcatgcctgtaatcccagcactttgggaggctgaggcaggcagatcatttgaggtcaggagttagagacagactggccaacatggtgaaatcccatctctacttaaaatacaaaaattagctgagggtggtggtacacgtctgtaatcccagctactcgggaggctgaagcaggagaaccacttgaacttgggagacagaggttgtagtgagccgagatcgctccactgcactccagcctgggcaacagagtgagactgtctcaaaaaagaaaaaaaaaatacgttacttagggctggatatataagtaccttaaacagagttggagcactgttagtcaggatattgggcatgaaattaagagatgacacccagaagttcaatgtgtatttgttgattgaatgaacacaaattattccaaaattgtcaatacctctagacaatgaaaacttcctttcttcctgtcttcctctttttgctcaatgtaacaaatgtaagattaatactcacatacacacacacacacacggctggtcaagatggactgatttatactcctacttgaaacaactaaaaaccttgaaaaatgtataaaacaatggctctaaagacattggacattagatactgaaggacagtgatcctagagagatgggaaaaaaatgagtgagccctacaattgccccaccctactgcctggagagaatctccaggccataatgcagggcagtacaacctgcccaaaaaccttaaaagcaagatctggaagtataaaactgttcctaagtaatctaaccatatcttagaaaaaactcaagaaatttttagacatgtgaaaatcagaaaaacattattcacaagagggaaaaatcaactaaaaccaacacagcaaaacacagataatggaattagtagacaaagacatcaaaatcattattgtgactacagttcatatgttcaagaagatagaggaaagctcaaacatgataattagaaacataaaatattaagaagattcaaaccaaatttctaaggatgagcattataatgtctgggatgaaaaatacacgagaggattcatggaagattagatattactggagaaaatattagtaaacttgaagacatagaaatagaaactatccaaaataaaatgcacagaggaaaaaaaaggctgaaaataaatgagcagatcatgagtgaactgtgagatgactttaataaaaagtgtgtgcaattggaatctctaaagatgactgagaagaggagactgaaaagacatttgaagcaatagtagccagaatgtttccaaatataatgaaaattataaacccagagatccaaaagccacaataaacccaagcacaagagctatgaataaaactatgccaaatcgcactataattaaattttttaaagccgatgataaagagaaaatcttaaaagtagccaggaggggaaaacacacaaataaacaaacaacaacacataatgtatggagaaacatgacagcagatttcttcttggaaacaatgcaagctaaaagacagtggattaacatctttactcaaagaaaataaatacatctgtcaatctagaatgcttcactgtgtaaacacatttttggaaactaaagagaaaataaaaacttttttttcaggcatgcagaagttgaaagattcatcaacctcagatctgcactataagaaatgttggcctggtgcagtggcttacacctgtaatcccagcactttgggaggtcaaggtgggcagatcacaagatcaggagttggagaccagcctgaccaacatggtgaaaccctgtctgtactaaaaaatacaaaaattagctgggcgtgctggcaagagcctgtaatcccagctatttgggaggctaaggcagaagaattgcttgaacttgggaggtggaggctgcagtgagccgagatcatgccactgcactccagcctgggcgacagagtgagatcttgtctcaaaataaataaataaataaataaataaatataaaacgttaagggaagttcttcaggcagaaggaaaattgtgccagctagaaatgttgatctacgcaaatgtatgaagggcactggaaatagtaacttcttgggtaagtgtaaagactttaaaaattatgatttaaaaattgtttaaagaaaaaatttttctttaaataataattgacggcctaaagcaaactgattaacaattactgtgggattcgtaacatatttagaactaaatgcatgacattacagagcattgcatgtcatcacattgcattgcatcttctaaaacactgaagagaagagactacttcctaactaattctatgaggacaatattattattattattattattattattattacttgttgagacagggtcttcctctgtcatccaggctggagtgcaatggtgtaatcctggctcactgcaacctctgcttcctgggctcaagcaatcctctcacctcagcctctcaagtagctaggactacagaaacactccaccatacctggctattttttggtatgtttttgtagagatagggttttgccatgttacccaggctggtctcgaaatcttcagcccaagtaatatgcctgccttggccccccaaagtgctgggattacaggcatgagccaacgtgcctggccaagaccagtattattactctgttgttaaaatcagaaattgatattacaaggaaagaaacctacaaaccagtgttctcctgaatgtggatgtaaaattcttattgtagttttagcaaagcaaatctaacaatatatgaaaagagtaatatggctgggcacggtggctcacgcctgtaatcccagcactttgggaggctgaggtgggtggatcacgaggtcaggagatcgagaccaccctggctaacatggtgaaaccctgtctctactaaaaatacaaaaaattagccgggcatggtggcgggcacctgtagtcccagctacttgggaggctgaggcaggagaatggcatgaacccgggaggcggagaaaaaaagagtaatatatcatgaccaaatgggatttatcacaggaatgcaacattgctccaacattggaataattaatgtagttcacgacataaatagactaaaaaagaaaaaaaggatcatttcaatagatgtagaaaaatcatttgacataatttcaaatccatttctggtaatactcccagaaaaccaggaagagaggggaaattcttcaacttgataaagagcatacatctatgaagaacctttaactaatgtcatatttagtggtgcattctccctcagctcaggagcaaggcaagaacgtgtgcttatattatttctacttgaaattgtattggaggtgtatcccatgcaaaaaggtaagaaaaaaaagacattcacattgaatagaaagaagtaagactatctttatttgcagatgataaagtcatcaagtcatctgattgtctagaaaatcttatgaaatttctacctagaaaatcttatgaaatctacaaaaagctactagaattaataagtggtttagcaagattgtaagatacaagatcacaataaaaacatcaattcattttatttatttatttatttatttatttatttatttatttattttcagatggagtctcgctctgtcacccaggctgcagtgcagtggcaggattttggctcactgcaagctctacctcccaggttcacgccattctcctgcctcagcctcccgagtagctgggactacaggtgcccgccaccatgtccggataattttttgcatttttagtagagaccgggtttcactgtgttagccaggatggtcttgatctcctgacctcatgatctgcccgcctcggcctcccaaagtgctgggattacaggtgtgagccaccacgcctggcacaaacatcaatttatttccttatactagcaaggaataatagaaaattgaaatgaagcaaaaccatttacaacagcatgagatacataaaatacttaagagctaaatctgacaaaagatgtatgagatatcacaatgaaaattactgatagaaattaaagaagatctaaataaaaggagagatataatgtgttcatggatagcaagactcaatattacaaagtatcattcctttccaaattgatctgtagattcaatgcaattccaatcaaaatcccagcagtcttttttggtggaaatgtataagctgattctaaaattaacatagaagtgcaaaggacttgtaatagctaaaaccagtttgtaaaagaagaataaagttggatttacactacttgactttaagacttagaaactggcattaatcaagacagtgtgaaattggcatcaagaaagaaaaacagaacaatgaaacataatacagtacagaaatagaccttctcatatatggccgattgatttttgacagtggtgcaaaggcaattcactggagaaagggtagtttctgttttaacaaacagtgcatgaacatttgtttatccatatacagaaaaatgaaccttttatctatacttggcaccatataaaaataaactcaaaagcgatcatagacctaaaactataaaactttaaaaataaaacacaggggaaaatattgtgatcttgtttctgttctcttttttttgagtcagagtctcactctgccaccgggtccaagtgattctcgagcctccgccttgcaagtagctgggattataagcgcctgccaccatgcccagctaatttttgtgtttttagtagagacggggtttcaccatgttggccaggctggtctagaactcctgacctcaaacgatcgacccatctcggcctcccaaagtgctaggattacaggtgtgagccaccatacccagccataactcctgttctttgaaaggcacttttgagagaacaaaaagacaagccacaaactggaagaagaatatttgcaagttaaataactgataaaagatgtatgtttagaatattttttaaaaaaccttttaaaactcaatattaagaaaaccaacaacttaaacaaaaatgggaaaacattcttcaccaaagaagagaaacacatggcaaataaattcacacaaagatgttcaatgctcaacattactagtcatagggaaatgcaaattaaaccacaatggaatattactataaacctcttcccttttatttatttatttttttgagatggagtcttgctctgtcacccaggctggagtgcagtcgcgtgatctcggctcactgcaacctctgcctccctggttcaagcgattctactgcctcagcctcccgagtagctgggattacaggcatgcgccaccacacccggctaatttttgtgtttttagtaaagacggggtttcaccatgttggtcaggctggtcttgaactcctgacctcaggtgatccgcccacctcagcctcccaaagtgctgggattacaggtgtgagccaccgtgcccggcccttcttccctttgtgttagaaagatctgatgtcaccacctgaacttatttcctggggctgctgtagcaaattattacaataatttaaacaatagaataaacaataggattaaaacaatagaaaagtattctctccgttctggaggccagaggtctgaatcattgtgtcagcagggttggttccttctgggagctctgaagaagaatcagttccatgcctctttcttggcttctggtggttgccagcgatgcttggcattcttggccttatagacacatcaccagcctctgcctctgtcatcacttggcatccaccctgaacgtctctgtgtcttggtgtccaaatttctctcttgtaaggacagtatgggattaggcccaccctaatccagtatgatttcatcttagcttgattatatctgcaaaaaccactattttcaaataaagtcacattcaccggtaccaggggtttggaattcagtttatcttttggggggacacagttcaactcacaacacgaccttaactaataatcgaacttgcatcatttatagtcagacaaccaaacattatgagcttcctgatgtgatacatacaacatgacgtcatagtgccacctttgtattcttgccaaaaatgtttaacccatatctaatgaaactgtttaaatgaacttccaggttacagggaatatacagggtagaggagtaagttaaatgacaccatgataaagcaatctgacaagtccagagtagggggaatattctgcaagacaactagtgtgctgtcctcaaaaagtctatgtcaagccagaggcagtggtgcctgtagtcccagctgcttgggaggctgaggtggaagaattgcttgaacccaggagctggatgctatagtaagctataatcaaggtctctctctgtgttgtgccactgcactccagctttatcaacatagtgacctcgtctctctctatatatacaaagtcaatgtagtgtcatgggttaaaaaatatgtgatgtgcctgtgtgtgatcagcactgtttaacagaaacaaagtgaaccacaaatgtgagtcatatacagtatgtaacttttaattttctagtagtcacattaaaaaagtaaaggccaggtgtggtggctcacgcatgtaatctcagcactttgggaggctgaggtgggtggatcacctgaggtcaggtgttcaaggccagcctgaccaacatggagaaaccctgtctctactaaaaatacaaaattagctgggcgtggtggcgcatgcctgtaatcccaactactcaggaggctgaggcaggagaatcacttgaacctgggaggcagaggttgtggtgagcccagatcgcgccattgtactccagcctgggcaacaagagtgaaactctgtctcaaaaaaaaaaaaaaccaaaaatgtaaaaagaaactggttaaattagttttaataattgttactaatttattaatattaaattagaataaataattaacctagtgtaatagtttttttattactgctgtcataaacttattagtaatttgttatcttacggtgctataggtcagaagtccgatacaggtctcatcagactaaaaccaaggcgtggtaggctgtgttcttttctggaggttctgggagagaatcaatttcttgctcatttgggttgttggcagaatttactaccttgctgaggtccttgttttcttgctagctgtacgctgagggatgttcttagcttccagagactgctgtatttcttggcttctggttttctttcttcatctttgaagccagcaatggcaggtcaagtacttctcaggttgcatctccccgatacagttgggaaaggttcattgcttttaagaactcatgtgattagattggacccacctagataattcagtataatctccctatagtaaaatccttaaacttagtcacagctgcaaaatctattttgctctgtacagtaatatattctcacacgttctagggattagggcatggacatctttggggtgcattattctgcctcaccctcaatatatcaaaaaaattttcagttctatatgtaagccataaaaaatttattaatgagctattttacattactttttgtgagtactagttctttgaaattcattgtgggttttatacttatggcacatctcagtttggatcaggcacatttcaagttcttaatagccactaaccacttgcggcttctgtattgaatggtccagttctagattaaaggacacaaaagagacagaaacctgatacaaacaataattagattttgatttaagaaaatacaaatcaaaacaatgtagctacataagacattttggaaacaactggggatatttgtatatagatttaaataatcagcaccacttactgttaattattttagccgtggtattggccttgacgtaggaggatgttgagagttttaggagatgtgcattgctgtgatcaccccacagatgtgggatagatctcccctaacccacgtgaaatttggtttggatgttgagactgatgatgctatctgcacaccgagaaggcatgaaaagatttgtgactcatgtaatgagccattctggggagagtacagcaggttcctaaacaggccccaaagtagcttgagaatgcagacaggggcagctggcctggctttgtgtttggaagggaggctggggtgagggcccctacccatgggctgggtttgtgtgggtgaaactatctgccagcagcaagggagggagcagctgggcttttttattggtttgtccagctatacggcaagaggggaaaagggagggatggggcttgacagctgtcagcagttaatcatcaaaaatggagtcagaattggctgggcgcggtggcttacgcctgtcatcccagcactctaggaggccgggttgggaggatcacctgaggtcaggatttcgagaccagcctgaccaacatggagaaaccccgtgtctactaaaaatacaaaattagccggacgtggtggcgcatgcctgtaatcccagctacttgggaggctgcggtgggagaatcacttgaagctgggagggggaggttgcagtgagccgagatcgtgccattgcactgcagcctgggcaacaagagtgaaactccgtctcaaaaaaaaaaaaaaaaaaaaatggagtcagactcattacagttcaccccgatgctcgactgctgactgaaaggtgccatgtttcatttgatttcatttgaacttgtttaagtgaaccattatggtgccctatgagaccttgagtctgaggccaataaaggaggtgaaagttctgttaaacatcttttccaagagcccagtattcattgtcaaaattaaaaatgtttgtgcttcaaaggacaccaggagcaagtgaagacacagcctacagaataaaaaaatttttttttgcaattcatatatccgatgatggacttgtctctagacaagtcctctaaagaactttttcagttcaataataaaaaaaaaatagccccatcaagaatgggtactattgcagagtaaaaagacaactgacagaatggtagaaaatatctgtaaatcatatttgattaggttgtaatatcctgaatatataaagaacacctacaacccaacaacaaaaagacaaacaacccaattttaaaaatgggcaaagggctgggctcggtggctcaagcctgtaatcccagcactttgggaggccgaggtgagtggatcacttgaggttaggagtttgagaccagcctgatcaacatggtgaaaccccgtctctactaaaaatacaaaaattagctgggtgtcgtggcaggcacctgtaatcccagctcaggaggctgaggcaggagaatcacttgaacccaggaggcggaggttgcagtgagccaagattgcaccactgcactccagcctgggcgtcagagcgagaccctgtctcaaaaaaaaaaaaaaaaaaaaaagtattgtggtaattcactgtgaggcaccactcatcctttccaggttcacaaacaggctattaaatggagaaacagtgtggataatcaccccttttctgaataaatcttgtataatgagttttaatccttgaaggccctgctttaatttatgttgggccacattaactattttaaatgaaaaggaagaggtgggtccatggggtcccattttgtcaacctgattgttaagtgccaaagacttaaatgaattttaatgtattagtcattggatcagagagtccatgcccattataggacattttagaataatgggtgctatgactacagggaatttaggcaaggcaatagttcagatggttaaggcgaggcatacctgtttctcctgtcatatttagtaacttccctaagattacaaagggtaccttgtcttaatttagtgggatcactggtataactgtaatttgagccccaggattaagaaaatgacattttcccaattggtacatttcagcagatgttgaacttaattcaaaactcatgttgtagaggcgcaaaagccattcggcaccctttcatgtttttgttgtataaattctttcagtaaattttggattcccggctgggcgcggtggctcacgcctgtaaccccaacactttgggaggccgaggtgggtggatcacctgaggccaggagtttgagaccagcctggtcaacatggcaaacctccatctctactaaaaatacaaacattagctgggcgcggtggctcccgcctgtagtcccagcaacttcggaggctgaggcaggagaattgcttgaacccgggaggcggaggttgcagtgagccaagattgtgccactgcactccagcctaggtgacagagcgagacgctgtctcaaaaaccaaaaaattattttggatttctacttgggtcatccccaactgtggaccttggttttttgttttctccccctgtatccaggtatctggagggaggtggttactcactgtggtttgaggcaggtcccctccatctttgccatatttgtaagcttcatccttcagagggtctcacattagcatggtcagggcgcgcctcctccagggcagtggttaccttgttggctaagggacacagacttcacgggggcagagcagccctgttgcgtgttgataagttgtggcactcagctgaccccagaatctttgttggtccattttacagctgtccaatagggccagggtatcctctaaccccttaggaggggctgagataaagcattcaggcctttttcacaggagtctgtccatgggatgtcatggatgtctttttcttataaccctggggatcagggtctttggtgtgagagaggcacaggtagcagcagcagcagcaggtggcacttggaaagccatcaccttttaggggtgtggacctcagcaggccacatggtgacagctcctgcaccccatgagtgaccatcattgggtggaaatactgcacaaggtgttactagttcccctgagtgctctgcagattcgggtccaatgtctggttgagactcacagccaaaggccccacagtaagagttgctccgctgagcccagcatcagccatagcttatgctggaaccacacaattcagtgagacacacagatagggccatgccaaggtccatgacccagagccacgttaaagagggctccaatcccatacttctgtccctaaacaccaattactgaaacttccagcttgccctggtaaaatctgtaacagacgctcagaggacttggccaatcagcacaaagcagcacagctccaaacacaaacgaatcagcgggcagaggcgcagagggcaggtcgccagcaggcagcagagccagttcacaagccaaagcgagggaagagagacccctgccatcacggtcactgcccacatgccctgcttgctgtgccaactgttggggtccattgtgcctctgtgggatgaccacatgtgttggggtatcgaagagtgtgtgtcatgacatctgcaatgggcatttaaaagttgcaaccttggccaggcgcggtggctcacgcctgtaatcccagcactttaggaggccgaggtgggtggatcacctgatatcatgagtttgagaccagcctggccaacatggtgaaaccctgtctctactaaaaatacaaaaattaggtgggcatggtggtcggtgcctgtaatcccagctactcgggaggctgaggcagaagaagcacttgaacccgggaggcggagtttgcagtgagccgagattgcaccactgtactccagcatggggcataaagcgagattctgtctttaaaaaaaaaaaaatattgcatccttaaggctttaggcaggggagggatgaggctgaagagggccagagaaaaccctctcaggcgctgcagtggggcagaggggatggaagtaggaagcgcatagggagagaagatgagtttggctaaccatcttcatagtccaaggagattgagaagctcttgctctgtggtggtgcgggggaaaggcagcagaggagaagggctgagagcaagactcactcactcacgattgggagcagcacagcgcctactggctcaaaaaaaggccagccatggtggctcacacctgtaatcccagcactttggaaggctgaggcaggagttcccagtgctgggtgagcccaggagttcaagaccagcctgggcaagatggcaagaccccaactccacaaaaaatgtaaaaattagccagggatggtggcttgcctgcagtcccagctactctagaggctgaagtgagaggattgcttgagcccaggagatcgaggctacagtgagctgagatcatgccactgcactccagcctgggcaacagagtgagaccctgtctcaaaaagaaaagaaagaaaaaacccacaaaaaaccttggcttggggccaggcatggtggctcacacttgtaatcccagcactttgggaggctgaggtgggcagataacgaggtcaggttttcatgaccagcctgaccaatacggtgaaaccccgtctctattaaaaatacaaaaattagccgggcctggtggcaggcgcctgtaatcccagctacttgaaaggctgaggcaggagaattgcttgaacccaggaggcggaggttgcagtgagccaagatcatgccatcgtactccagcctgggcgacagagtgagactccgactcaaaacaaaacaaaacaaaacatggcttggacctaaattatgtcccactgaattgtgtgtctttgttgcagcataagctatgactgatgctaggcttgggggagcaactcttactgtgtggcgtttggtgtgggtctcaaccagacgtcggccccagatctatagagccctcagggagggaactaattactactcagactacttgagttcaagaagcaactgggcccattatttaacccctgtgtgcctcagtttccttacctgtaacatgagggtgtatcagtttgctagggctgccagaacacagtacaacagaatggactgcttaaacaacagaaatgtatctactcacagttctggaggctgggagtctgagctcaaggtgtctcagggctggtttgttggaggcctttctccttggccgataggcggccaccttctccctgtgtcctcacaggatcttccctctgtctgtgtctgtgtccaaatttcctcttcttagaagtacaccagtcatattgtattagggcccatcctagcagcctcatcttaattacctctccaaagaccctatcttccaatacagtcacattctgagggactggggtcaggactccaatacatgaatttggagggggacataaatcagcccctaactggaggataatatcagaatttattccttcgcaaacttgtagagttgattgaattaagacacgtaaagtgcttagaacactaatagaaaatgctttttactactactattattgttatttagagacagcatcttgctctgtcacccaggctagagtgcagtggcatgaccatagctcactgcagcttcgaactcatgtcctcaagcgatcctcctgcttggtctcctgagtcgctaagattgcaggcgtgcaccaccaaacccagcctgtttgttttcttcctttctctctctctctctctctctctcattctttctgatagagtcttgctctgtcacccagtctggagtacagtggcgtgatcacagctcactgcaacctccgcctccctcaagtgattctcctgtttcagcctcctgagtagctgggatgacaggcacgtgccaccatgcccagctaaattttgtatttttagtagaaacggggtttcaccatgttggccaggctggtctcgaactcctgacctcaagtgatccactgccttggcctcccaaagtgctgggattacaggcatgagctactgcgcctggcacccagcctgctttctattgtttaagatgcagaaatgacgtatgaaagcggggcagccactttacaggtttccccaagctcctgcctcccctgaaatttggctcctttgagtcctaatggttctcggaccccatgccctcagaagccttccctacttgcttcaggcgcctcccttctgaggtcacagctctgaggccaggatcctctgtaaccgccttctccccacgaggcagcctgattgcgtggccccttgaaagcaattaagcctgtggttttcaaactgtggtctccagaccatcagcatcacctggaaactcgttagaaaggcacattcttgggcccaccccatacctctgtgttaataaaccctcccgctgattctaatgcgtgctccaggctgaacaagaaggtcctcagtgaaggaatcaattctgccgaactaccgcttggggacagcacaggaccacaaggtaaccatggctgatgaaaagcacccgcaaattgcaaaagcctctcactgcccttccggcctccagtgttgctgtaagcccccttcagttctccccacataccctgcatgacctctggaaacctcatacctgatggtgtcactggttcagaattcttcagcagctccctaggacatgaaaggtccttcatttgctgagcagtatctcctgccaggtgcatcttgcacgggctcctctctctctgtctctgtacgttccctggggtcggacccacctgggttcgaatttcagccctgccatttaccgtctgggcgtgatgtgggcaagatacatcattttgagcccctcatctatgaaatgggagcagttaataagacttttctcatggggcggttatgagagtcggagacctcatgtataaagagattttagcctaggatcatgcaaacagtaggtgcctgatatgcagcaactctgcttccccatctgcactgccaagtgcaagaggcagttgcccacaggcccatctccgtgccgggtgtagtaggtgctgtctgagtcccaccaatcctctgacttcgtggcttccatctgccagaacctgtgtgtctttgcctggggctttctctggctgctggtatccactgtggtaccagggccataaatctctgtaaattggggatgataataatgcctacctcatggcactgttgggaggccttgttagtaccctgcgtagaagggggcctcagatgttggggtgctgttggggtgctgtctctgtaactcgcctacccacaggagtagccgtatcaggaatactgggcagtagatgaaagacgtgggcctggctcacatggtggctctctgctctgccacccaggccggcacctgagacgcctgaattgatgtcataggatgtaagaggacaccaggagcctggggctgccagtaaccctggcaccttggcagggcagtgagttcttcatagcctctgagaacctggaccatctcaagctggggacctggaggtgactcagcccctcagcctgcagcctgcagggccagagggacctgcactttcctgggtgggtgggtgaggggcatagaccttgtccaaagtcactgtcatcaggaccccactctttcttgtggttgcttcctgggggtttctctgccctttatcttcatgttctgtgtggggctaatctggcccttggatgcagtaggcatttatctatgtgacttgatgtaaggggctccaaaaatgccccccgcccaaccagcctaaatatctccctgccagactgtcatactgtctgtgcatgaaacccctggcttcagcattgccctctcccatttcctcgtattgaaataggtggcaagctgcagtcaggactggcaaagagccctgtgcaaaatgaaaatggagggctcctcgtccaaaagttaggaagaatttcaaggcaacaacagaagagaattcaactaagcacggggccctgcactgctgcacaggctgtgcactcttgaagccagctctgcctgcagcctgagctcttagcgagacaggatcacctcctttccttgcaccagtgaggagccctggagctgcccagatcaaggacacaaagacaaaacgagcctctttactcagctcaggacaattgttgttttcggagatgggtgaagctcagggccctctgtccagctggcctaacttcagggcctcctgaaattcctctgggttctccaggcccctggagtcctggcagttgatggggcattttctgcctatggcctggctggccctgagcttgtccttactctattgcagtgtttgccttgcctgctgagggactcgctctggcatgtgggcctgatcctgaggggtccttttcctgtttcctgaacaaccaccagatctttggatttagctcctagcagccccaggagcacccccagacagacttcccgtgcttggggctgttctaggctctccagatccactgtcttctccatcgccctgtgccccacaaggctgagctgggtggctgcctctgtgggctacctgtgcttttgcttctggttgggtatgaccaatggaagagagggaggagtgagagaggtgggcatttacccgccagctccctcctggggctgctgtagcctggctgtgtccctgccccaggtgccagctgcttgtcaggcagctctccccgctcagccctttctgcctctgggttctaaccctccccgctagcagctccctccccttggactgccaggccttgggtggtcacagattccagctgtcactactgttccctcccttgagatctcccaataccctgaccatcctttgtgaatggttcctttattaaactctcccagaattatccgaatttgaatttgtaactatttccttccgggtccctgactggtagaaagatctttgctctatgttgtacccctgatctatctttgtagccctcaatcccttgggacagccaggtcagggaccagatgtccaggaactcaggccagagcccactcccaatctccttggagaacaccacagaagaagtggggaccctcccccaggccccccaaacacacccaccgggtactccatcctcagggaattgggcaccaggggcctacacattgtgtctttttctccttcagcttcggggcttgatggaggtaagacagtcagccagagaggctcatccccacacaggcccccggtgaccaggtaactaggtaaccagacaagtatacaattagacaactaggcaaccagataaccagacgacaggcaaccaaacaactagataaccaggcaaccaggcaagccgacaagtaggcagcattctctgagggggacatccgctggctctgctggtcaaccttccctctatcttttcctggcagcagattttcccttagggagcttgtcctccttccctactcaggggaggcacctgtgacctctgcctaagccagtcagccagtcaggcttacccaaagctgattctggaacttgactaacctagaagaggctgtttcttgctggacctgcagagaggaagtgaggtctgaagctgtgccacccttttaaatctaagacaggagccaacctgaaagaggcaaggctgggagatggggagacatcatttgagccttgattgaaccattcctgaagctgctgccttggcgcctttaagttttatgaaccagtgaattctctttttgctgaagccacttcacgcagtgttcctttctttgcaaaaggaagaaccctggctgggatgagagtccctgaaactttgctccactgacctgctgctaggagtgaggcccctccctgcttgtgatagtcttcctggagcaccacccagggcattggtcaggaggcttgggctcaaatctgggactgcttttaatgagttgtgtcaatggacatgtcccttcagctctcggggccttgggcttctcacaaatagccatgcctttctgccctactttagctgtgaatggggctgaatgttagtaccatttcctgggagccgttggtgtggtatggaggtcaggaacatggctgactcaaatctggctttcagagtctgataaccaattgctccagggtgtgtagccagggctttcctgctgctctcttcttcatttggggaagtctctggctcccagccagggtcagagcccaatgctgtggcagctaagccttcttctccattcctggcttgctcacgggaggcacctgtgacctccacctaagccaatcagccagttaggcttacccaaaactaattctggaacttgactaacctagaaaaggctgtttcttgctggacctgcagagaggaagtgaggtctggagctgcgccaccctttcaaatctgggacaggagccaacctgaaagaggcaaggctgggagatggagagacattatttgagcctcgatcgaaccattcctgaagctgctgccttggagcctttaagttttatgaaccaatgaattccctttttgcttaagccagttctttatttctttgggccctatctctgcctcaaatcagtgtacaggaggcttcagcacatcattttaacaatgattttatcaggaaattcccatctgtgctcataactcagcctttaattggtggaaattaccggtcccatatgcttagagctgtggttttcaaaatgtgagctccagaccaacagaaccagcaattacttgggaactggttagaaatgcaaattttcgggccgcattctatacctgctgaatcagaaactctcggggtgcccccagcaatgtgtggtttaagaagtctgccgggtgattctgattctcactcaagtgtgcgaaccacctgcttggagcttttgctggttcaaaaggtgcacatagaggatgatctggcactgcctggatctcctttggctgcagatgggctgttccccagcagcagcgaatgagtatttgctgctaacggcttccagctgttccttctccctgcactaaatctgccttccacgggccatggccagtgcctgatgggcatgggggtataccaggctggtctctttgtccagtggaccagagagggacactccaatgtgaattactttctagcccctctgtgaattaggccagagctagactttaaatgctcaagtcactgcttcttccaaacgcctagctgtttttgggaccacaggtgtgagttaccgtacaacaccctggtgaaaaaaaaagtcacttggctttgcaaaattaaaataagcgtgcttgattgcttgattatcctcctctgcaggctggttttaaagtcaaccaggagagcctctgactgtcatctggtttgcaggtcctggtggccatcagctgtgattgggtcattctcctctttgtatcaaagaatcaacacttccaccccttggcccagacctcacagggacatgtttcatggtagcctaagagatacaaaaaacttgtcaactgctttcttcctctgactgcccttcctgagaagggagaagggaaaaatatttactttttgttctcaattatcaaagagaaaggcaagatgccagttactttcccagttaatttctgaggggtaacagaaagtttggcgagtgtgtttgtgtgactgtgtgtttgtgtgtgtggctgtatgttgggtgttggggtgtgtttgcttgtttgtatgtgtttgtgtgtctgagtgtgtgcagatggatgtggaagtgtgtttgtgtgtttgtgtgtgtgtagatggatgtggaagtgtgtgtgtctgtgtgtgtgcagatggatgtggaagtgtgtgtgtctgtgtgtgtgcagatggatgtggaagtgtgtttgtatgtctgtgtgtgtgtgtacagatggatgtggaagtgtgtttgcacgtgtgagcctggggcttgggttctgtgacagccacagcaatggggccagagccccatcactccccagaagatgtcagcccctccctcagtgccaggcctcacagctgacacagcattcagctgctatctcttggagcctgctgggggcacagatggtgtcactcaacaggacggtgggataaactgtcagctccagccacttccctgctttgatacttcagggctctgaggttctgcaaaaacaattatctgggtaattatggccctaaacatactctgaagtctgggaggaaggagaagtaaaaatataaaaagaccagatgggaatataggaaaacatttacagcattaacttttttcctggggactgtgattatgggtgatttctatttatgtctttgtgtttatttgcatttttgaaattttctacaatgaacacgaattatgtgtacaataattaaaaatgaaagcagaagaataattataaatatcccacacctactccttgagtgcaagctttccctcccacccccaacaccacaggaaatcgttaacttcctcaactttgtgttgttacaacttcccagcatgggaaaagtagaaagacagtataaccaacacctgtgtacctatatgcaatataccccaccaccacgtatattcaaaatgggtaataattttttatatttgcattatatatatatatatatacacacacatacatatatatgcttttttcctgaaacatttaaaagtaatttgcagatatcatgctatttcacctctgaacacttttgaatacatcacttaagaataagggcagtctccttttcttttttgagatcgagtcttgctctgttgcccagcttggattgcagtggcacgatcttagctcactgcaagctccaaatccccagtttgagcaattctcctgcctcagcctcccgggtagctgggactacaggtgtgcgccaccatgcccagctaatttttgtatttttagtaaagacgggtgtttcaccatgttggccagactggtcttgaactcctgacctcaggtgatccgcctgtctcagcctcccaaaatgctggggttacaggcatgagccaccccacctggctgccaagggcagtctcctttgtaagcacaataacatttcacacctaagaaattaataatgattgcattatgtcatctaatgtctagtccatattcaatttccccaattgtcctaagagtggcttttgtagttatcatcacatttaggattgttaaaaaaaaaaaaaaaaagaaagactggcttttgtagttgtctattttttgaaccaggatccgattaaggttcacatattgtatttggttcttatgcctctttaatctctttcaatctagaacatccaccccctcaatatttttttccctaataactctaactttttgaagaatccaggccagtttcttgtggaatatcccaccgctggattagtctctttccttgtgatgttgtttcacttgtctctgtattccccgacttttctgtaacctgaaggtaatctttaagggtttgattacatttaggccctatatattactatattgattagattgaacattttcggcacaaatacttcggcacaaatagaaggctcacggcatcagatttttcaattgcctttgatggcttgtgaagcccattagcgtatcaattgaaaggcatgtttccccctttgcaattaagaagtgagattttgttttggcatcttataaatatctcatttatgtcaaccatttgggactggcctgaatcaatcattacattggggatttgaaaatagtgatttttggaatatcattatggacctatggatgattataattcagtgtattacaatcattactctctttgatgttcagagtatcctaaatgtagccaattgcagtcccttcatgcctggtcgtatgtcctgttgtcatgacccaattaaatctctgagtgtttccttgctttctggaacatgatgttctaggctcaccttgtattttcctggaatcagccatttcttcaaagagctgtggttctttttagtgcaaaatggtaattggaaagcaagagctgggtgctaggtgtgctgattgctatgtgggggtgccgtcattgcttttaggtcctttctttggacagtgttaggaaatttttttttaaattatgagctcctattgatattttttattcagacttaatattataggagttttaaaaaacttctttgatctttaaaaatttgtctcatttctctcactggaaatattggttaatagcaacattatatatcttacaatatacgtaaagtagtttagaaataaacctcctgaatgaaggttaagtttttttttatatattttgtcttgggattttatcctaccataaatatataatcagaatactacattcaaagataattgaaataatgatattttccctaagtggttgctatcaacctgatacatagtcaggtataattatttattaattaattttttttttgtagagatagagttctcgctttgttgcccaggctggtctcaaactccttggctcatgtgatcctcccacctctgtggcctcttaaagtgctgggattacaggtgtaagctaccctgcacagcccatttattttggattgcattcaattttagggtttgcttttttctttttgatttagcttttgaatatgtaaaatattttcgtactttaaaagttaatgctttataacacagcaagtcttactttcaaccctttcttctccactcaagttcctgccacccattggtaactttttatttatttctagtttatccttctagtgtttaatttatgcaaaattaatgcacatactctttatatctatatctatatctgtatctgtatctatatatcttatttaccttttatttttgcataatgggaaatgtattattaatgctatttgcactttgcatttttcacattgccatacatcctagaagtcattccatgtcagtgcatagtgatcatcctccttcatttgcacagctgtgtaaatgccgcagaatttattcaaccagcccccttgtgttagttccttcttgcattgcaataaagaaatacctgaggctgggtaatttataaagaaaagatatttattttggcttacagttctgaaggctgtacaggaagcgtggtgccggcatctgcttctggcgggggccttggggagcttacgatcatggcagaaggggaagggggagggggcagtgtatcacatggtaagagaataagcaagacaacaagtggggaggtgccacatcttataaacaatcagatcttgggtgaactcagggtggggactcactcatcaccatgtggaagacacgaagccattcctgaagggccttccctatgacccaaacacctctcaccaggccccacctccaacactggggattacgtttcaatgtgagattcgaaggagacaaatatccaaaccatatcacccctatagacagacatgtgggttgtttttgatcatttgttattacaagtaactccacagtgaaatatcttactgttttggatttgtggaggtgtaatttcagagtagattccaagaagtgggattgctgggtcaaaagcatttgtaacttcttaggaaagctctttttaagccttgatctgatcctgtgacggtgacttcctgtggccacagttatgacctcagattcccatcctgcctgactttgaccttggctccaagcagtgttcttcactgaagcgagcgtgcacaatcaaccctgtctaacaaggctatttccctccatgcgatgttcttctggactgcttcacccatccagatcagccagattccgagtcaattgcaagcctcatctccttcatggagccttccctaaaattatcaaataatgttctgttttgttatttaatgtttcactcaacatttcctgagtagaacaactcagggaccacgacccattgctgctctccaggagcctacactgtggtgagcgctgcaggaggcacaaggacatggtgctcacggaagaagaggagaggtccttcccaaggctgtggggggcacaagaaggcatttcagagaggcagttagggtgtgagctgagacctgaagcctacatgggagggtgcagagcaagggcagatcagggttggtggaagatgcctcagaattaggttttcttcttcttcctcttcttcttcttcctctttttcttcttcttcttcttcttcctcttcttcctattctccttcttcttcttcttcttcttcttcttcttcttcttcttcttcttcttcttcttcttcttcttcttcctcttcttcctcttcttcctcttcttcctcttcttcctcttcttcctcttcttcttcttcttcttcttcttcttcttcttcttcttcttcttcttcttcttcttttcttcctcttcttcttcttcttctttttgagacagagtcttgctcttattacccaggctggagtggaatggcgtgatttgcaacctctgcctcccggtttcaagcgattctcctgccttagcctctctagtagcttggattacaggcacctgcctccacacccagctaatttttgtatttttagcagagatggggtttcaccatgttggccaggctggtatcaaactcctgacctcaggtgatccacccgcctcagcctcccaaagtgctgggattacaggcagagtgaccgcagctggccataattagattctcatattagacaaatttctctgcccttgtgctcataaatattgtttaaatgaatgaagcactgaatggagaatgggttggagaagggcagaactgaaggtccaaggaccatgtagaagctattgcagtcacctaggagatcactgcagcttacattttttattcttatttttattttttggagacagagttttgctcttgtcgcccaggctggggtgcaatggcacgatcttggcttcatgcaacctctgcctcctgggttcaagggattctcctgcctcagcctaccgagtagctgggattgcagacatgtgcccccatacctggctaatttttgtattatcagtacagatggggtttcaccatgttggccaggctggtctcgaagtcctgacctcaggtgatccacccacctcagccttccaaagtgctgggattacaggcgtgagccacctctccctggctgctgcagctgaaatttgagtagatgaatttgagggtttggcttttgaccagataggggagtgtgagcagggagataaaaccgggtaaaacatccaacttctgacttgagcaactggattgatgtgagtgccttcagtgagtcagataattttaaaaaagaaatatgggattttatgggtggggaaatgggcttccttttacacacatttttgtttgacgtgcttgaggttcacccaagcagagacaatagtcaggagtttttataaaaggtcaggggactcatctagtctgaagatagaaatctgtgggtgattaacatatggatggcaaatgaggccacatctaggaagagagtgtggcttgagagtagtggtctgagctccaaacccggaggaatggtcacatttatgagttaactggaagaaagagacagagaaggagtgtcaagagaggtgaaagccaagagcaggtgccaaagaaagcgagtacacttctaaggaaggaggaaatggtcagtgagtcaaaatattcccaagagggtaagtgagatgaggccgtacaaaggtccaccgaggaagctattaaagaacagtttccggccgggcatggtggctcccgcctgtaatcccagcattttgggaggccgaggcgggcggatcacgaggtcaagagaccgagaccatcctggtcaacatagtgaaaccccgtctctactaaaaataacaaaaattagccgggcatggtggtgggcacctgtaatcccagctactcgggaggctgaggccggagaatcacttgaacccaagagcgggaggcggaggttgcagtgagccgagatcacgccactgcactccaccctggcgacagagtgagactccatctaaaacaaagcaaagcaacaacagtttccgtggagtgaggagagcagaagccagccagattccaggggcttgggtgataagtagagcacgaggcagagagacaccaagaagggtttgctccataagccatagaaggagttgagaatgggagatggatggatggaggaaggaagcatcctttgtttttttaatttctaatttaatttttttttttttttgagacgaatctctctctgtcgcacaggctggagtgcaatggtgcaatctcggctcactgcaacctctggctcctgggttccagcgattctcctccctcagcctcctgagtagctgggactacaggcatctgccactatgcccggttaatttttgtatttttagtagagatggagtttccctatgttgatcaggctggactcgaactcttgacctcagatgatccttgcacctcggcctcccaaagtgctgggattacaggggtgagccactgtgcctggccggaagcgccctttgaaacggagtctcccattctccattgtccctcagggtccagctagcgaggaggaaagctgtgatggggtgcaggagtggaggagaaacgtggcaactgccgaataaacacaccaaccagggaagacggccaaggctgggcccagaatatctggaatggaacccatcttccttttgcagcaggaagtggagttggaagctgagttgaccgtggaatttccgagcttggaggatgttcgtggtgaatgcttttttatttatttattttttcattcatgaagacagagttggaatgaagtgacccccctcccctgaaacactccctcccacagaggaagcgcttaatttagccttatgttcccagttagaaaatatccctgaggtttgaaggcttctgctgggttgtttgtcaccctccaacatggcaggatgtgaaaaccagacctctctgcgtcttgatttcagccaaggagcaccatcccaacctcagtgccaagaggaagtcctcttagaccacctatggcggatgtggaaagaggcgttgaaagccagctttgggagccttgggggacctccaccctggcccttaaggcaaagagagcgagttgaaaatcagagagaatttctttagataatttcctacccacttgtgctatgggtctgtctcccttgggatgagatagagagggtgcttcccccacatttggggtcaaatgagaggggcatctatagcaccactcagcttgatgtgagcatttgtagcttgcaagacagcagactggtatctgattcactcaagagatttgatttgtgataggctatgaatagaactgatggccaggggcctgaaaagaagtatgactgtgtttgggaagtaactgcagcctctggggtggtgggtcaaaggggctaatctcgtagcagatgtggccatacacaacagataaagaggattgtttagatccctcccaaaagggctacctggtgtaaggtggtgatcccagcacaaggagccttgaggtgaaccatccttaatacctgggaagaggtggcttattccagataagagatggctttaaggctggacttggtggtaagcacctgtagccccagctacttgggaggctgaggcaggaggatcccttgagcccaggagttcaaggctgcagtgagctatgatcacaccactgcactctagcctgagcaacagagagagaccctgtctctgaaaaaaaaaaaaaaaaaaaaaaaaaaaaaaaaagtaaaaaaccagccaggtgcaatggttcatgcctctaatcccagcactttgggaatccaaggtaggaggattgtccaggagtttgagaccagcctgggcaatgtggcgagacactgtctcaaaaaaaaaaaaaaaaaaaaaaaaagaaaagaaaagaaaagaaaaagagatggctttgtaaagacattctaagcaagagatagactgggacctcaagacttacaggaagggttcttggctacacaatgattagaatacagctgttgccttcatctctatgcctattattttatatgccctcaagggaattatcattaagctgaataaagacagatgtcacaggctgggtgtggtggctcatgcctgtaatcccagcactttgggaggccgaggcaggcagatcatgaggtcaggagatcaagaccatcctggccaacatggtgaaaccctgtctctactaaaatacaaaaaattagctgggtgtggtggcgtgtgcctgtagtcccagctactcgggaggctgaggcaggggaatcgcttgagcccaggaggtgggggttgcggtgagctgagatcgtgccactgcactccagcctggcgacagagcaagattccatctcaaaaaaagaaagaaagatgtcacagtacaaaagccaatgatgaaaaagcaagagttttcaaatgttaaaaaaaaaaaaaagacattctttgggtggagttactgaaacatcaaattgagcatgaacaaataaacctgtaaccttctaagtatttgagaaggctggattgctaaagaaactccaagcctggtctgcaaccctgaaagtaacccctggtcccccagacctgcaccataggaagccagctgtgaaggctctgcagaatgtaggaagtgcatacattccaaagcccgcttgaaatcgagaataattaatctccaagtagtcaatgtcaaggtcaaagaggaaatgagcagagttaaatggaccagccaaggattcactccatggtcagggagggagtttcatgattcttgcccatctagtgggacttaacaatagttgtggaccactggctgctgcacagatttcccttcccccatttttcaaattagagcttttttgttgcagttatctgttttcactccagcattgtacacatccccacgtgtggtggggaccagataacttgtcctttattttatagaccattgaacacagagaagtttatccagccctgacggagagagcttcacatctcctataaatactggacttggctaggcacagtggctcatgcctataatcccagcactttgggagactgaggtgggtggattgtttgagcctaggagtttgagaccagcctaggcatcatggcaaaacccagactctaaaaacaaaaaacaaaacagaacaaaaaacatgcaaaaaattagccgggtgttgtggcatgtgcttgtggtcccagctacttagggaggctgaggtgagaggattatctgagcctggggagattgaggctgcagtgagctatgactgtgccactgcactttagcctgggcaacagagcaagaccctgtctcaatctaaaaaaaaaaatccttgactttgagctggaatcattaattggataaaactttaggatcatctaccttctatggatgaacagaagtgtttgtatagccaaagtggtggacttatagaaagattactaaattgtaccctgtcttctccatttgtcttttattctacggtaacaaatagaaacttttactaggtgtttgttcagctataatcctgtttcctggcttctctggcagctagatgtggccatgtagccaggtcagtgaggtgtgagtggaagtgatatgtacaattccctggttttatcattaaaaggaagttaatttttattcattctagtttagtcttcatttctgcagtaagttatttgatttcaaattttcttgagtgctatcaccttatttctaaatttttctgttctgatatgtattgctatttcatatcttatataatttctcaatatcgttcagctcattttgatatagtagattactttataaaatctgttttgtgggcatatctttctggtgtgttcattgtctgtaggaatgttattttgctacgtattctcttttttcttttctttatttttctgtagagaaggggtctcactttgttgccaaggctgatctccaactcctggcctcaagtgatcctcctgctttggcctcccaaagtgctgggattgaaggtgtgagacgctgtgcccagctttccccgcccccctctcttttttcttataataacattgcatgggtggggttttttgttgttgttttgttttgttttctgagatggagtcttgctctgttgcccaggctggagtgcagtggaacgatctcggcttacggcaacctctgcctcacactcctgggtttaagtgattctcctgcctcagcctcccgagtagcggagattacaggcatgtaccactatgcccagctaattttttttttgtatttttagtagagaaggggtttcaccatgttggccaggctcatctcaaactcttgacctcaagtgatccacccacctccgcatcccaaagtgctgcgattacaggcgtgatcctggcctgtatgggttttttgccttgatgattttctattgcttatttcccttccctttcccttcccttctccttccttaattccttccttccttccttcctccctcccttccttcctccctcccttccttcctccctcccttccttccttcctcccttccttccttcctctctctctctttctttctttttctctctctctctttctgtctttctttcttgggcctcactctgtcacccagactggagtgcagtggcgtaaacagggctcactgcagccttgaccttctgggctcaggtgatcctcctgcctcagtcacttgtgcagccagaaccacaggtgtgtgccatcacatccagctaactttttgattttttgtaaagacggggtctcactatgttgcccaggctagtattgaacaactaggctcaagtcctccttccttggcctcccaaagtgctgggattacaggtgtgagcccctgtgcccggctgtattgtttgtttgtttatttatttaattatttatttatttattttttgaggcagagtctcgctcagctgcccaggctggagagcaatggcgtgatctaggctcactgcaaccaccgtctctagggtttaagggattctcccatctcaacctcctgagttgctgggattacaggcacccaccatcatgcctggctaatttttgtattttcagtagagatgaggtttcaccccaagttggccaggctgatcttgaacccctgaccttaaatgatccacccccttggcctcccaaagtgctgggattacaggtgtgagccaccatgcccagtctctattgcttatttctccttttttttttttgagatggagtctcactctgttgccaggctggagtgcagtggcaccatcttggctcactgcaacctccgactcccaggttcaagcaattctcctgcctcagcctcctgagtagctgggattacgggtacccgccaccacgtcaagctaatttttgtatttttggtagagatggggtttcaccaggttggccaggatagtctcgatctctgaccttgtgatctgcccgccttggcctcccaaagtgctgggcatgacccaccacactgggactctattgtttatttctatgtgaagttagttttcctcaacttttagaagaaggctgaccaggacttctaggaaagatggagacagcaagtgacagtgggtatctttgccttattccagaatttggagggtcaaaatataatgtttctccattaagtatggcttttttacgaaggatttttggtggatatctttcaccaggttgggggagtttcattcttttgtagatatctaggattttttatccttacttggtgtgaatttaatttaatttttcttcatttgagatagtcttgtatagttttaaattttaataattaagtgactagttaatacatttaaatgttagaccatttctgaattctggaggtaactctaggacataatgcattattgctttgaacacattactgaatacagcttgcagaattttattttgaatttttatatctatatttatgaatgatataggtcagaattttctttctcattttgttcctgtttggtttgggtatcaaagtttttctaaccccattaagtgcattgaggcatgttctcttcttattttctggaagagttttatgagatgggaatgatctgtttcttaaatactttgaagaaactgcctgtgaaaacatcagagcctatttttttttacaaggtagatttttaaacttctgattacatttcccaaatgattataaaattatttagcttttctatttcttcttgagtcagttttgcatggatctatgttccagggagttacccattttcatctaagtttttaagtttagtggtaaaaatttatttgtaatttataatggtttatagtttaaatttctgttttttttcaccattatgcattgctttttcactttccttattgttaagttgtaccttctttcttatatgtttcgtagatatttctttattttagagatgtcgctctgtcactcaatctggagtgcagtggcccaatctcacctcacagcaacctccgcctcctgggttcaagggattctcctgcctcaggctcccaagtagctgagattgtagatgcgtgcaccacacccggctaatatttgtatttttagtagagacaaggtttctccatgttgccaaggctggtctcgaacctcaagtgatcctcctgccttggcctcccaaagtgctgagattacaggcacgagccaccttgcccagccattttatttaataatttaggtatttaatatctaaatcttattgttttattttttctactttctttggatttgttctattattcattctttcatatttaatgttggctacatcactcaataattttcagcctttcttttttttttaacattaccatgcatggttatacatcagtcttacatcctccttcctagaggcagcacctgctataggtattcttgtatgtgtgatgtatttaaggagggcactcagaataagggagcagaggggagatggatgaagaagaggaaggagttaagcaaggatgtgtgttcagctggagtctagccttggcttgagcccaagattctggagtatgaatggccgtggaactggtccttccttgaggcaagtgggctggattttgtatccctatttgagtcagtgattggctgcagaccactgtggaagtggtggctggcacataaagtccaggtgaagtggctctcatcaactgagggcaattctatggaaaagagcagtcacggagctactggcaggcaacactcacagcagccagaggatgggcacattgacctgttataggggatatggttggggcaccaatagcagctattacatccaataagatatagtattttggctgactacagtggctcacagctactataatccgagcactttgggaggtcgaggcaggaggattgctctagcccaggagtttgacaccagccttggcaacaaagaaaaaagaaagaaaaaagatatagtatttatataatactataatactataatgtctcaaagaaaaaaaagatatagtatttttataatttcatatttgtactatttcgttatttattatagatttattattttatctgtaacacttagaaatgtgtttgaaagtaatttataaatgtgtttcttagtaattttttgtgagatttataaatcaatttatttgcatcaagagaacttttatttacttatttatttatatttatttattttttgagacggagtctcgctctgtcacctgggctggagtgcaatggcacaatctcggctcactgcaacctccgcctcccaggttcaagcgattctcctgcctcagcctcccgagtagctgggattacaggcacgtcccaccacgcctggctaattttttgtatttttaatagagacggggtttcactgtgttagccaggatggtctcaatctcctgaccttgtgatccgtccgcctctgcctcccaaagtgctgagattataggcatgagccaccgcgcccagccaagagaacatttatgatactcattctttgctattggttagctattgattgctctatggtctattatgtggtcaatttttggaaatattgtgtatgcacttgagaagaataatgcttttttttgtttgttttgctgggtgcaaggttctatatatgccttttagatcaagcttactaacacaattgttcaaatcacctgtattccttaaaaatatttaatctacttagttctcagttattgaaagaagtgtgctaaaaatttacaccaagataatggatttgtcaatttctgcttataatttcatcaaattttgtttgacttatatttcaccaattcttaggagtagcccctagagaagaaatgtcagattacttttagttagatggcagtggaaatgaggagaaactgggaataatattttcaatgtgttgggaaaaaaattcatagaattttatgcccagctaaaacatcttttaagaaagaggtgaaaaaaggcatgttcataaaacaaaacatctaaaatatgggtttacccccagcagaatgttacaaaagattgttcagcaagtcctttagatagaaataaaataaactcagatagaaagtctcagatgcaaacaagagataaagagaaaaaataaaggcaaatatgtttttccatcatatttactttgtagcaccagacacgacttcttcttcttcttttttttttttttgagatggagttttgcttttgttgcccaggctggagtgcaatggcgcgatctcagctcactgcaacctccacctcccaggttcaagtgattctcttgcctcagcatcccgagtagctgggattataggcatgcaccaccacgcccagctaattttgtatttttagtagagatggggtttctccatgttggtcaggcgggtctcgaactcctgacctcaggtgatccacccaccttggcctcccaaagtgctggattacagggatgagtcaccgtgcctgacctagacacggccttttctaacggctctgcctcttgcccaattttcagaaaggagcatctgaagtggaaacaaaaccactgtcaccaaatgctttgcggggttgagaaaacagtaatttcaggctaaaacatttgctgccatcagaaagactatgactacctttattttgaaatatgtgatggaaacctaagagagaaatatggtttaaaggaaacacatgatagaatcattttgaggttcttctattttaaaaactctggaatataagaataactctcaaaattcactgataagaagacaacccaataaaaatgggcaaaggatttaacagacacttcactgaaaaagatacagatgacaataaagcacatgaaagaatgctgggccgggcacggtggctcctgcctgtaatcccagcactttgggaggccgaggccagtggatcacttaagatcaagagtttgagaccagcccggccaacatggtgaaaccttgtctctactaaaaaaaaatacaaaaattagctgggcatggtagtgtgcacctataatcccagctacttgggaggctatggcaggaaaatccctcgaacctgggaggcagaggttgcagtaagctgagatagtgccactgcactctggcctgggcaacagagccagactctgtttcaaaaaagaaaatgtccaacatcattaatttttatggaaatgtaaattaaaactacaatgaaatgttactatacacctactatatgacccagcaatccaaattctagtatttatccaagtgaaataaaaacttatgttctgagccaggtgcagtggtgcatgcctgtagttctagctacttgggaggctgaggcaggaggatcgcttgagcccaggagttacacgctgtagtgcactatgattgtatctgtgaatagccactgcactctaacctgggcgacagcaagaccctatctgtaaaaacaaacaaacaacaaaacttacgttcacacataaatctgtatgtaaatgtatatggcagcttcagtcataatctctccaaagaggaaacaactcaaatgtccttcaattagtgaatggataaactgtggtataaccatataaaggaatactactcagcaataaaatatgaacaactaatatacacattggcatgaatgaatctcaaatacattaagctaagcgaaagaagccagactcaaaaggctacacatactgtatattttggaagaggcaaaactgtagggagggaaaataggtcagttgttttcagaggctgggggaagggaagaggtgatcacacaggggcatggaggaatattttgggggtgatgcgactcttttatatattgattctggtggtgataacataactgcgtgaatgcatcaaaacttgcagaagtatacactagaaagagtgaacattaccctatgtaaattatacctttaaaaaaagaagaaaaaaatcgaggcatcctcagggtattttataacctcactctcttcaacatggaagtaaatgatgtttattacacactcctgcaaacacatacccacaccccctccccccaccaaaaacgctgtttgttgttgagtcagatttccagaaccacttcctctagccctctctgactttttaacagacgacttttccacctactttaccaagaactggatcagatgaacacatctgacctttctctcctctgtctcaaatttcctctccttattcatgtgaaaatacaagatgacctctaagaacctccaaaagtttgcattctagtatggaaaataattttaaaaattattaaaaagtactataaactcaccagaaagtatagtgacttggtagtatgaccagacgctggcatactttgacatttcaggaccatttgaagactcttcaaccatttacagttaagtggaagaagccaatgtgaaaaggctacttattgtacgattgcaaccctaggatattctatgaagacggtaaaaagatcagtggttgccaggggctctggaggagggagggacgaatatgtagaacataggaggtttttagggcagtgaaattatgatatgtaattatgatatgatatgtaattatgatatgatatgtaattgtatgatatgtacgatatcataatgttggatacatatcattatacatttgtcaaaaactcatgcaatgtataccaagagtgaatcctaatgtcagtagagactttagttaataataatacatcaatatgggctcattaactggaacaaatgtaccacactaatgcaagatgttaaaaatagggaagattgggaggaaggtgaaggagtatatgacatctctctgtactttttactcagttttttctgtaaacctaaaactgctaaaacaaaaatttactaattaaaaaaaagtggtatagaagggttgaactttagacgtgaagttttaggaatacttaacccattttattttgcttatttccttcttatgtatgcacaagagtgataagccataattcattgattctaagacacacagtaaaaaaattctttcttcctttttttctgagacagggtatcactttgttgcccaagctggagtgcaatggcacaatcacagctcactgtaacctcgacctctctgggctcaggccatcctcccacctcagcctctcgagtagttgggattacaggcacacaccaccacgcccagctaatttttctattttttgtagagatggggttttgtcatgttgtccaagctagtctggaactccctggctcaagtatctgcctgcctgggtctcccacagtgctgggattacaggtatgagccactgcacctggccaaaaatctttctgaaatcagattgcatcttaaaatagatggaattttagatttgctaaaatatggtatggtaaaaaagtatgataaaatatgtatgtttaagatttctttcaataagtataaaataaaaatctaagattataaagtattgtgtcggaatgataaaggattgtgtcagaatttaattggcaatatttttccttttaagtgggggttaaaataatagtgcatcttaggtgtggtggctcatgcctgtaatcccagcactttgggaggccaaggtgggtggatcacgaggtcaggagttcaagaccagcctggccaacatagcgaaaccccatctctactaaaaatacaaaaagttagccaggtgtagtggcgggcgcctgtaatcccagctactcgggaggtggaggcaggagaatcgcttgaacccgggaggcagaagttgcagtgagccgagatagcaccatttcactccaggccaggcgacagtgcaagactccatctaaaaaaaaaaaaaaaaagtgtgtctcacaattgatgaaattgatcaaattagatgaaatatgatataagtttaaaccaaagaagccgattaaatggatacatacttaatttatctgttgttgcctctggcagtagggatccaaaggagactacaatttgacttgtagtgtttcatttcttgtatttatttgcttttttgattttattgattttttttttttgagaccgagtcttgctctgtcacccaggctggagtgcagtggtgcaatcatagctcactgtagccttgaaatcttggcctcaaacgatcctcctgcctcggcctcccaaagctctgagattacaggtatgaaccactgtgcctgtctacaaaaaaagaatgacaaggcaaatgacatataatgttcacaataatcatatctgagaagcaggagcatggtgtttgtctttcttggttatttttattttattttctgtatttacaaattttaaggaacaaaacagaaatgcctgaaaaaataatactgaagagactgagtgtggtggctcacacctgtaatcctagcactttgggaggcaggaggatcgcttgagcccaggagttcaagaccagtgtgggcaacatagcaagaccctgtctcattaaaaaaggaaaaaataataataatactgaagaacaacagctcagaaaccttcttggagcagcctgccaatcaccaattctatttgctggggagtattcttaggcaattgaagaatgatagaacttgagggaggaaaagacaggcaggcagacacaaaggacaaatatcgtgtgagtctgcgtatgtgaggtgcccaccatagattcatagagacagaaagcagaatagtggtcaccaggggctggaggtggggcaggggggtgtcattgtgtaaagagcacagaatttgagcttgggttagtgaaagagttctggaaatggatagtggtaatggacacacgaattgtgaatacactgcatgccactgaactacacacttaaaaatggttaacatgagctgggcgcagtggctcatgcctgtaatcccagtgttttgggagggagcttgaggccaagagtttgagaccagcctgggcaatatggggagaccctatctctacaaaaataaataaatgaataaacaaataaataaataaagccaggtatggtggcacacacctgtagtcccagctattcaggaggctgagacaggaggatggcttgagcccaggcaggaggatggctatgattgtgccagtgcaccccagcctgggcaacagagcgagaccctgtctcacgaaagattaaaatgataaatgttgtgctttgtatcttttactacatgcacacacacacatgttgggcagaagaaatcaagaattttattttggccatgttaagtttgaggtgctcaggaggtagtttgataaaaatccaagctctagcgagtgaccagggctctagacgtagattcagcagacaccacgttgaagccatggggctagcgagagtgtggggaaggggaggcagtcaggaccaagaggggccctcccacattcagaggagcattgtcccgtgaggcaggaggaaaaccgggagagtgtagggtccgagacgtctacagcagaaagccttcccagagggaggcagcggtcagtggactggatgtttctgagagattgagcgaggtggggaccatcggatttggccacgtgggaggtgctggaaaaggaagctggcctgcagtgggctgggaaggaaggagctggggatgggaaggacccacaagccttgaagaaggtttgctgtgaatatcacggaggaggggcgtggtcgctggaggcagataaggaggttagggtaaccttgttttgtttagatgagagcggctggaaaatgtgtgtatttttatgggaacagtccatgagacagggagagatggaagaaacaggagaggagggagaactgaaggaggaggggcacagtggagtgaatggcttttgctaggagcaggatgcctcccgtgtctcagaagggacagcagggtgggacagacagcccctaggacagggttgagtgatttccccagcagcgctctctctctgagagctctctggggtgtgtgcagagagcgtagtaggtgggtctaactccatcagtgattctcaaagtgagcttgatgggcgagcagcatcggcatcaccaggaaactaagaaatgcaaaccgtggggcaccaccccaaacctactggatccgaaactccgcgggcggggctcagccatctgtttttcacaagctctccaggtgattctgaaagtttgagaagcactgaactagggcgaaggagcccagcgcatgcagatgacccaaaacgtctggatgagaatggcttcagttcttcgaggaggcagaagttcatgtggtatgagctccaggggtgtcttctctcttcgccagggacagaactataagtaaaccctggaaatttccaagcatggaatgccattcagaggaactctgaatctttctaatgaaggattatttatcaagacaaacaacacacttcaatgtacctattctttttccacgcctgcatttgaatatcaggtttcacctatcttgatctttgctcctgccagcagtgatttgaaaggaccctggactctgtctccctgggtcacctctttcagggttgtcccgaagaccttcttgtggcctggtccatctttccacatggctcaattccagttttcatttctgttgggaaatagcagtgacctggcttggccattctctgtgggaggcctttttcttctctgctgaaataaagacaaagatgactcagcctctcccaacctccaggatttcccagtccttccagtgactcagaggatggtctatttaatgggtaactaacagctcctcccaggaagttggcggccccagcctccccctacctgagtcaccagctctgggatgctcccatcaaggcacagttaccttcgagaccaggggaggcaaaccaagaaagatcagcaataagtggatcaggaaagaggacagaagctgaaaggctagatttgttcctcatttgctggcggccttgggtggaccaatggagggctcagtgtccctatttgaaaatggagaaattgtgtatcctctgatatcatagctgccccaaaggagagaagataagcccagccctctggaacttttctgtgcaaaaggaagggaaccctgggggtgggtttatccttgaggatttctaggacaagctgtagcaggggcagggcatagcaggagagtggaggaaggtggggtgaggggcaggaggtcagatatggggtgggctggccaggggcagggccggagcgataagtgggaggcagggaagcttggcgaggagcaggacctggagggcgcagggcacctggtgggaacagtagcccaagaccttggttttgtgatgtcctcaattttgccctgctttcttctccctgactccttcactacttctttgcctttgctcttctccattcctctcctcccccttctcttttctctcctccttccctctctcttgcatcactgagagcatggaggcagccttcccatgggttgagcgtttccttcctgtttagatagtgagtggcatctgcttttggagcagccatcggtccatcctgtttacttgttgctgacccagtgggttgtggccagcgaggccatccaccaggacccccacagggtggagtgggaaccagggcgctgacacacacacaggcatacacatagccatgaccaggtcaggctgccctactggagttgatgtttgggatgctgtgggattggcagctgggccgaggtcatctcctgtgctgttgacacggatgccccagcctgcctggcatggctcagggctcggaaaagatctgactgaggctgagcacgcggcctgcagctgctcacagggtcaggggaggagtaagaagcagaaagggagatgccggaggggcgacattaggaggcaccttgtccggtggtgctgtgattcctcatgaaggagttagagccagacaagataaagggcttacaggacgggtgcccttcaccacaccgcctccctgttccacctcccctgaccgggcccttccttaattcatgtgatttgagatgcactcctttgcttttcttgatttctctaaatgctgtgcagtggctactgttcagggtgacgctggaaactgacaaagtttccaggggccggtggtatgggctggggaagggggcaggcctgtgagaggacagatggtggaggcgatggcatttaagtagaaagttggaggaacctgaggcaaaaaaaaaagtgcttgaaaggctaggtgtggtgcctcacacctgtaaccccagcactttgggagaccaaggcgggaagatagcttgaggccaggagttcgagaccagcctgagcaacattgcaagaccccatctctataaaaataaaaaaattggccacgcgcggtgactcacgcctgtaatcccagcatttggggaggctgaggcagtaggatcacctgaggtcaggagtttgagaccagcctgaccaacgtggagaaaccctgtctctactaaaaatacaaaaaaattagctgagcatggtggcgcatgcttgtaatcccagctactcaggaggctgaggcagaagaatcgcttgaacccaggaggtggaggttgtgctgagccgagattgtgccattgcactctagcctgggcaacaagaatgaaactctgtctcaaagtaataataataataataaatctgaagaagctgattaaaaaaataatattaggccgggtgtggtggctcacacctgtaatcccagcactttggaaggctgaggtgggtggatcacctaagatcaggagttcaagaccagcctagccaacatggtgaaaccccgtctctgtcaaaaatacaaaaattagtcaggtgtggtagcgagtgcctgtaattccagctactcaggaggctgaggcaggagaatcacttgaacccaagaggcagaggttgcaggagaattgcttgaacccaagaggcagagtaccattgcactccagcctgggagacaagagcgaaactctgtctcaaaaaataaataaatacataaataaaatgataataaaataaaaaggaaaaaaaagatgggtgctctgattttaagatactggcctatgacctgactcctaaactctgagataagggcctaagcatacaaagattatcaaagaaaaaatcaaggaataaacaaaactcacataagccgattctagaggtgtggcctgggctgctctaaagggatttgtggaattactgaggttacctgaaactctccaggaatctggcctcctgggctgattacacaccaagaatgatggtgaaaatccagatagtccgggggacccagatctgccactcattgctgtgtggctgggccagtgcttctactgaaaaattattcattgtctgcctgaaattcagacgtaactgggtaaactgtatttttttattttttattttttttattatactttaagttctagggtacatgtgcacaacgtgcaggtttgttacatatgtatacatgtgccatgttggtgtgctgcacctattaactcgtcatttacattaggtatatctcctaatgctatccctcccccctccccccaccccatgacaggccccggtgtgtgatgttccccttcctgtgtccatgtgttcttattgttcaattcccacctataagtgagtacatgcagtgtttggttttttgtccttgcgatagtttgctgagaatgatggtttccagattcatccatgtccctacaaaggacatgaactcatccttttttatggctgcatagtattccatggtgtatatgtgccacattttcttaatccagtctatcattgatggacatttgggttggttccaagtctttgctattgtgaatagtgccacaataaacatacatgtgcatgtgtcttcatagcagcatgatttataatccactgggtatatacccagtaatgggatggctgggtcaaatggtacttctagttctagattcttaaggaatcgccacactgtcttccacaatggttgaactagtttacagtcccaccaacagtgtaaaagtgttcctatttctccacaccctctgcagcacctgttgtttcctgactttttaatgatcgccattctaactggtgtgagatggtatctcattgtggttttgatttgcatttctctgatggccagtgatgatgagcattttttcatgtgtctcttggctgcataaatgtcttcttttgagaagtgtctgtttatatccttcgcccactttttgatggggttgtttttttcttgtaaatttgtttgagttctttgtagatcctggatattagccctttgtcagatgagtagattgcaaaaattttctcccattttgtaggttgcctgttcactctgatggtagtttcttttgctgtgcagaagctctttagtttaattagatcctatttgtcagttttggcttttgttgccattgcttttgatgttttagacatgaagtccttgcccatgcctatgtcctgaatggtattgcctaggttttcttctagggtttttgtggttttaggtctaatgtttaagtctttttttttttttttttttttttttttgagacggagtctcgctctgtcgcccagtctggactgcggactgcagtggcgcaatctcggctcactgcaagctccgcttcccgggttcacgccattctcctgcctcagcctcccgagtagctgggactacaggcgcccgccaccgcgcccggctaattttttgtatttttagtagagacggggtttcaccttgttagccaggatggtctcgatctcctgacctcatgatccacccgcctcggcctcccaaagtgctgggattacaggcgtgagccaccgcgcccggccacgtttaagtctttaatccatcttgaattaatttttgcataaggtgtaagggagggatccagtttcagctttctacatatggctagccagttttcccagcaccatttattaaatagagaattctttccccatttctggtttttgtcaggtttgtcaaagatcagatggttgtagatgtgtggtattatttctgagggcgataacttgtattttcacttgcaaatctgaaaacctctctgaaccgtccaaaggacagatcctagccccaacttgaggccatcagcagcaaacctggaattactttgaagcctgggatttcaccttaaaaactcatataaatttcaagctcatctccatgtttctatccttgttttgatataaaacaggtattaaatcgtcctggttaaaaagcaagtgtttcggccgggcaccatggctcacgcctgtaatcccagcactttgggaggccgaggtgggtggatcacctgagttcaggagtttgagaccagcctgaccaacatggtgaaaccctgtctctactaaaaatacaaaaattagccgggcatggtggcgagtgcctgtaatcccagctactcagaaggctgaggcaggagaatcgcttgaatccgggaggtggaggttgcagtgagctgagatctcaccattgtaccctagcctgggtaacaagttggtcaggtgctaaaataaaattaaattaaattaaaaggtcacttttttttagatggagttcgagaccaccctggccaatatggtgaaaccccatctctactaaaaaatacaaaaaattagccaggcgtggtggcacacgactgctgtaccaactactcaggaggctgaggcaagagaattgcttcaacctgggaggcagaggttgcagtgagctgagatcgcgccactgcactccagcctgggtgacagagtgagactccatctcaaaaaaaaaaaaaaaaagaaagaaatacagaacctcaggccccatcccagacctgctgaatctgaacctgcattttaacaaggtccccaggtgatttgtatgcagtctgccttagtgacctgtcaggagtctcatcttgacgggtggtctcagcagtagttggccttcttcagtgggaacctgaaggccacggaggcttgccttcccatcagagcttgctgcagtatctcccacccatgggtgtacaaaattggagcttttatccacaggaatggaacttggattcatcctttgcctgggtctattagtgtcttttcatcaatgcatcattgttccattgggacaaccatacagtaaccaaaaatgttggctgaagatcagggacttctgtcttggaggagaaacccgaggataaccagtcagaatatgtgtagaggagatgataaggcatacagtttggccttgacttcgaatgcaacattcatttactacatgaccatacaggcctggttttaagccatgcaccttcttgttttctaattcttttttcaatcatatgacactgacacaagttatgaaaagactgggcaagtgagggatgttctttatttgtcctctgtgtcagccagttatcaccatgacagtgctgtgaaacaaccatgaaattggcacacaacaattcctatttatttctcatgtgagtagggtgtctgggatgactctactgatctcctgtatctataagttagctgggtgttacaagctgagctaagcttggatcagataggcggctctgcctcaagttactctttgggtgagtttgcctctgggtgctggattgagttctggtctgcttctgtgttcattctgtggccctaggctgaagggcagtggctgtctaggaaaaggcttttaatagagatgataaaagcacaaggaagtggaaacacgtgagaactcttaaagctaaggctcagtagggacacactaccacttcttccctatttcattggccagggaaagccacactgtcaagcccaatatcagtagttaggaaaatataatcctcttttccgagtccatggcaagaatgtggatgcaaaatactatgtaaggaagtgaggaacgtggccaatacgtcagtccactatatcttccaactggaaactacgtttctgtggatatacatgacccattcctttataaaattcctcttggcaaagagtgctggctgttcaccaaacatcactttcctacccttcctggatatacagctaggacacatttcccagccttcttcgtacttagatgtgactatgtgactggttttggtaaatggcatgtgagtggaagtatgtcatttttcaagctaagactttcctctgctgctggttttatgcagattactacaagaccttaacggttgttggaggcacaagatggaatgagcctagatccctgaatcactatgtggaggaaggccattatgaaacaggaatattcctttattgtgtccgtaagatctaaacttctattacgttggagtcatttattcttgggtctctgttccactagccagcattactgtaactaacatatttcttaaagcccttctttgttactcacctttcatcatacatggtaacccagcgccttgtgatggtgggtgtgaagtgctccgcacatgtgaaatctgactgtgatcaatgctttactaatgttccaacacaaaatggaatctaagtcagctgcactaatgtgacagagactggtgctaataattactgacatttggagaggacctgatggcttggacatcacttttcacaccctttattctttttaatccttactacatccccgagaggcagacttttatcattacctccattttacagaagacaaaatggagttctccaaacttgccgaaggcttcacagctggccattagatacccgcacccgacctccttcccctcgttgtcctgtgaggaaacgatgaggagacttctcagctccactccattttacaccaatcaggctccaaaggcctccttggtgaggtagaaaaacagattctacccaaggctgctggtgctgctggtgtgacttataaggagaatttgcagttcccaggctttagttgaacctgcctgccctaggaatctgttcttgaagacaacagcaaggtattcctgggggcttctgcttggtggtagattacttgcaaagatggctgccaaggagtccttcaattcctgatgcacagtggttatgggttgaattgtgtccccctaaatatgctggggtcgtaaccctgagtaccacaagatatgaccttagttgaagataaggcatgatatattgtttgtgtgtatgtgtgtatgtatatatatacaccgtatattgtgtgtgtgtgtgtatattacacacacaatatactgtgtatatatatacgcacacacacacgatattgtgtatgtacatatacacccacacatacacacacgattatattgtgtatgtgtatacacacacacacacacacacacacacacacatgtttttgtccatggttcttagttcataactcccatagcccttattatttcctaaatgaccaaaacatatcttttgttaaaattatttgtccttttgtctttggttcctgaagtagcttcagaacagcttcagagccatgaaggtgaaaggcagtctttcgttataatgttgggggactttaggcctcagaagacagaactgctctctctgaccttcttcatctacctttcacctgcttctttttctccccaaggcaggctgtagaaatgaaagatatattctaatttccccccatctttctgtcttggagctagccataaagaaattctctgacttatctaattgcaggtcataaaatcctcatttcagaggggtcttgccccattccctggaggaaggactgctgcacggagaggctaagaagaatctgaacagacaggccttgctgggtttccccactcagtctattagtattagattataccctttttgtctaatcacatttctacacagttgtccttataccaatcatgtctatccgatgaagtctccataaaaggcctaagaggaggggtttggggagtttctggacagctgaactcataggaacatgaacaagaactcatccacgtgcccagagggtgttgtaccccaactcataagaatggaagctcctgttctcaggatacttccagacctcgcctgtataatcccatcatctggctatttatttgtattatttaaataaagatattacattaattaattacttcactaacgtatttatttttttcttccactgccagaaatatttgtattctttaaaatatcctttttttttttttttgagactgtcactctgtttcccaggctggagagcagtgataccatcttggctcactgcagcctctgcctcccaggttccagcgattctcctggtcagcctcccaagtagctgggattacaggcaagtgccaccatgcctggccaattttttattagtagtagagacagggtttcaccatattggccagactggtcttgaactcctgacgtcaggtgatccacccgccttggcctcccaaagtgctgggattacaggtgtgagccaccacacccgacctaaagtatcctttctaataaactggtaaacatgttttctggagttttgtgagccactctagcaagttaatcaagcccaaagaagggatcatgggaacactaacttgaagctggttggtcagaagttccagaggcctcggcttgcaataggcatctgaagctggggcagtcttgtgggaccgagccctcaacttgggggatctgccactatctctagatagatagcgtcggaattgagttgcattagaagatgcccagctggctgggcgcgctggctcacgcctgtaatcccagcaccttgggaggccgaggcaggtggattacctgaggttgggagtttgagaccagcctgaccaacatggagacactccgtctctactaaaaatacaaaattagccgggtgtggtggcacatgcctgtaatctcagctacttagaagcctgaggcaggagaattgcttgaactcgggaggcagaggttgcagtgagctgagatcgcaccactgcactccaacctgggcaacaagagtgaaattccatctcaaaaaaaacaaacaaacaaacaaaaaaagaaattgcccattgcagaattgctttgcttgcttacttattggggagcaatttcccatgtttggtcacagaagtgttctgtattgattgttggggcatgacagcagaggataaacagtttgtttttcagcccctggggtttttacagaggtaatcaagttaaatgaggtcattagggtgggccctaatacaatgtgactggtgtccttataagaagaggagatttgagctgggcgtggtgtctcacacctgtaatcccagcactttgggaggctgagacagaaggtcatgagttcgagaccagcctggccaatatggtgaaactccatctctactaaaaatacaaaaattagccaggcgtggtggcacacacctataatcccagctacttgggaggctgaggcagaagaatcacttgaacctgggaggtggaggttggagtgagccgacatcctgccactgcactccagcctgggcaacagagcaagactccgtctcaaaaacaaaacaaaacaaaacgaaacaaaacacccaaaacaggccgggcgcggtggctcatgcctgtaatcccagcactttgggaggccgaggcgggcggatcacaaggtcaggagatccagaccatcctggataacacagtgaaaccccgtctctactaaaaatacaaaaattagtgggccatgacggtgggtgcctgtagtcccagctgcttgggaggctgaggcaggagaatggcgtgaacctggaaggcggagcttgcagtgagccgaaatggcaccactgcactccagcctgggcgacaaagcgagactctgtctcaacaacgacaacaacaacaacaacaacaacacacacacacacacaaaccccaaaacaaaacaagaggagatttgagagatagctcatgggaaggtgatgaagccagtgaacaccagagtgccagaaaactaccagaagataggagagaggctggaacagattctcccttctagagggaacccacctacactttgatctggattaatgcctctagaactgtgagaaactaaatttcagttgttcaagccccctagtctgtggcattttgtaatggcagccctagcaaatgagtacaagactctttccatcaagaggtggagttgatttatccttcccttgaatatgggctggccttatgcctttcttcagctatagaatgtggtagaaatcatggcttggcagttctgagtctaggtcttaagatgtttggttgcttccatattcaccctctgggaagccaagccaccacatgctaaggaagtctaggctatcctgctggagaggtcccatggagaaagaggccattttgattgttccagcttcagccaagcttccagctaatgtccccagtcaacatcacatgcagtagaactgtccagctgagtccagcaaacccccaaaattgtgagaaataagaaatcattcagctgggcacggtggttcgtgcctgggaggccgaggcgggcggatcacctgaggtcgggagttcaagaccagcctgaccaacatggtgaaaccccgtctctactaaaaatacaaaaaaattagctgggtttaatcccagctacttgggaggctgaggcaggaggatcacttgaacccaggaggcggaggttgcagtgagccgagatcgcatcactgtattccagcctgggcaacagagcaagattctgactcaaaaaaaaaaaaaccgttgttttaaaccactatatttggggcagcttgttatgtagcaatgggcaactgagacgtgcatcttcagttcagtggggcaagtactccagcatctctgccactgttgcccttagtgcctccagtgccatccttccaccctcctcccggtggattctgggtgactcctgcctcctcacatggcttgcttctcttcttttttatttttattttttaaagatacattctgtttgatgttcccagcattgctcacttccatacactaattttcagtggtgcatcttgttggcagggcctggctgctgccagcgcttcagctgcaaaggagactgggaaagagtgtttctggctttggcatgtggggaggggttggggattcatgacatggaaaggtcccctaacatagaaagatgttcaaaaggtactggcactcctgaaatgtaatgaaggtcttcaaccatggccaatactttttgggaacttaatgtgttcttggcacacagctctgggtccgttcaccttctaaagataaacagggccctgaaatcacctttcctcactctccaccacatgaattaggatgaattgactctagggatgggtgtgtgactcagactcaactaatctgaatatcagaacctcagtgattagtttggaatgatatgtgaaccagtccaaggcaactaggtgtcaccttggctttttgctgaaataaatgaggacttgggctgtgagggtggagcctagagctgctggaagccaacttcctactgcaaagaacagagatgaaagataggggaaggaagaccaaatcctgatgtattttgtgcttcttggtacctgaatcagtcagaccaccttttatgtcagcatataaattacctgtctgcttacaccaagccaatttgcatagtttcccatcatttgtaatccatcaagtccatattaatatttttatttaataaacttttttttttttaatttttttgagatggtgtcttgctctgtcacccaggctagagtgcagtggtgtgatcttggctcactgcaacctccgcctcccgggttcaagcgattctcctatttcagcctcccgagtagctggggctacaggcgcccgccaccacgcccagctaatttctgtatttttagtagaaacgggtttcaccatattggtcaggctggtcttgaactcctgacctcaggtgatccacccgcctcggcctcccaaagtgtggggattacaggcatgagccaccgcgcccggccttatttaataaactctttggagtaggtactatttattaaccctgttttacaaatgaagaaactgaagcaaagagattaagcttacctaaggctacttaggggcagaattcaaatccaggagatataattctgagagctaacaaatattctgctctccttggtgacccaggaggattcacagaggaggttgtgacatgtagactaacatttaaccccaagagggcatagggatttgtggggaggggtgaggagaagaggcttccaggggatggaatagcttgggcaatgacaaggctttttctgctgagaggaaacctcacctgaaattcacttgtcccagtcctgaagcctgtccccaagcggttccctcttggaggggagcatcaaaccccatttctccagggccacctctaccctcctggcttctggacctctgccgccgccctgtgctacacgccggggcctgtcccgctgtgggtcccctgcgggaggggggcccctgctagggagggagggggtgcgggcccagatgtgggcgtgggacccgggtttccgaggcagggatccagcagtctccggcttcaggggcttctagcttcccggctcccggcggggcgggcccggggaggagctcggcgggtccccgcccagaggcggagcggagggccgggccggagcggggtgggtaggggacgcgaggcggagcggggccccacacaggccgcggcggctggctcgggcccctacggtcccggcggcggctggaggaggaagccaggcggctggcggaggaggagagacggaggaggccgagaccggagcgccgctcgccgcagacttacttccccggctcagcagggaaaggtacggtgcgcccgctctccggccccgggccccggctctcagcctcccccgggcgcaggcaggggctgcggccgccgcgagagggtgaggggcccggagcggtccccgagggctcggccggcccggggcttgggcggccagcgcggcgctcgggcgctcgggcgggggtgcggggcgttccgggaggctcgcggggagcagggggcgccgcgcccccctggcttccgccggggtaagcagtggtgtgggccggggtggcggcgatcccggcgccagggctgctcggcccgggccgggcgccgggggtagagggccggacggacccccgggctacgtgcgggaggggagcgtcccgggcgccctgcaggcgcgctccgtgggcgcagacaaagccgggcgcggacgccccgcgacgactcgggctgccgggagggtgggcaccggggagaggacagaaggctcccgggtgatggcccgaacgccaggagaggctgtgctgacttccccctctgggctccgggcgtccgggtggtccccttggggccccgggcagggtgaggagcagctttctcttaagggccaactaggggctcacgggttgtcccgggcttggcgggagccgggctcgcaaagggttcgggtgtgttggagggctcactttgtgggaggggctgagggaagccactgccctggggtaggggcgagggctcctttagagcagttgaggggcccgcggagcttgcgccagggggacttggcccgatgagatacgctcggtgcccggcacgtatagtgagaggtgcccacaggttgtttgcagaacctgctgttggtggcacatcacgtaccagtctgtgggggcaacttggccgtgattggagccagcagtaggtgccctggggttaccgggagcgacgcgggccggggtgccatgcatccgaaagtgtgtgcagtgaagcccccacatttgcattcggccaccactgccccctggcctcttgttaggcggagagggcatcccaattcctgccgctggccctgcctccgcttggactccaaggtcctctccctgtccccctttcttcagttacctcctctctctccagtgttagaagtggcttctattcccctggatcgtccacagcattataagaaatatgccttggcaccctgtctctccaattttgtagcccccttttcgccttaatccctcattccctccagcttcggaccttcttcccttcacagcaaaacttctctggagagccttctgcactcgctccttcagagcacagctcttccgttcttttgctggcttgccctgacttcggtcccaccccttcactgaaacagcctcagccaagctctccagtgagctccacgcccccaaaagcaagtcttcttccacctctcctggtctccttgaacactctccttcaagaaccagtatcctcccttggcttctggttttcttccctccttggctgccctttttcttagacttcttttcagacagctccttcactcagctccaaatgttggagggccccagggctttgtccgtagccgcttctctctctggtctatttacaaacccttccccgtttcattctttcttatgattttaaaaatcaagcatcaatttgcaaacatacagatcttaaatgtacatcattctcatggttttaaatagcagattttacctccagccccagcctctctacctaaccccccatctgatgatttatgatgtcctggatgacaaaaaacttaatatggatgaaacagaaccctgatggcactccccaggccttcccatctcagtgaatcgcccatcatctactcacttttttttttttttttttttctttgagacggagtttcgctcttttcgcccaggctggagtgcaatgacgtgatcttggctcaccgcaacctccacctcctgcgttcaagtgattctcctgcctcagcctcccaagtagctgagattacaggcatgcgccaccacgcccggctaatttttgtatttttagtagagatggggtttcaccatgttgcccaggctggtctcgaactcctgatctcaggtgatccacccatcttggcctcccaaagtgctgggattacaggcgtgaaccactgcgccaggcccatctactcacttttaaagatgggaaaccaggagcacaactccaccaagagcaagtccttttggttcttttcacaacgttgatctcaagcctgccctctgtgctctgactccactgttaaggccccaggctacctgccccaagccaagccaagccgcgtaaccctctccccaggtctacacttgcccttctctgatctattttagtagagcagcgagaatgttatagaaacttttgataggaccatctcatttctctaaaattcgtgatagctctctatcacacttgattaaaatctcaaagctttccctcagcctaccagacccttcccagtctggccacagctgacctccccagccttatctggaccactgtcccctttgcattctccctgacagacacatctgaatcatttctgccctttggacaacctaagctttctcctgccccacggcctttgcttgtgctatcttttctgccaggagtgttttccagtgccctttactggcctggcttttctccttcttatttttaaggtcttcacttaattataccttcctcaaatgccttcccagtcttgggaagtcccccgtaattaatcgtagcacctgacttattttctatattatatttatcacagttcacaaccatttgttacaattgtttgtatacttgacttatctggcttcttaagggccggaaccttgactgaatggaccagtgctgtatctggagcatctagcacagtgcctggcatgtagctgatgcccaggaaatcttcagccaggtggcaggttggggctggattgggcagagaggtgggtattgcagtgagcacaggagtcctctttaaacttcaagtgaccctgaggatttttattttctttccacaaaagcaactgtgcagattgctgcaagaatctaagggcgccaatgggatgtgaaaaagggaagtggagaaggtatgcgtggctggagggcagggctgtatgccgagggcagccggtgggatgtgagtctgtgtgtgtgtcactgtggttggggtaaatgatttcctttgctttctttggtagaaatgcaagctgggtcagcagagggatatgtgtgcatgttgggtgggagggagattctctagctcacaagatgtgggcagcctgggcagccagggattgatttcagcccactctcttgggtgactgctgggtacccagccctggggtggtctctctctatctctagactcttgcctttctacccacagctctcctgtttgcacagaggagccagttgagtgttaaattgtgtggctggtactctcagaatggaaggctgagagccaggggacctcagatctgggagggaggggagctgacccctggacagggggacaggggtggactgaggtaacaccgcgacgtgggtgctagaactaggggcagtggtccagatctgggatggggctggcatgcctaggaaagaccttgagctgggataggtagggatgaggagggcatcctgggtgggaggaatcaagcagaggccaagaggcagggcagggccctggtatattcactgcatgccctgcattgttctaagcactttgcaaatgttaactcctttaatgctcttaacagctctataaggtaggtcttattcccattttacagctgggaagactgaggcacagtcatacagctaaatagtgacagaatgaggattgaatccaaacattttacagacgggaggactgagtcatagtcatacaactaaataataacagagtaaggattgaatccaaacaacttggctccagaatccatgcttgaaatcggtccactctgccacttctctcatgcctctcagttatgtgtcagccgagggcttcctaagaagaggcttttcctgcctcccagaggtgcctggccttaggggctggggaggtgggaaagaaggtagaaggggtcctcgcttggagtgggtgaccgaatttttctgcttcatgccccactttttcttccaggaggggctccggacccaggccaatgggttgggcatcacgtacactgtgattttggggtgctgggaaggtctgctgcttctggttcagctaccgctttctgcctgagatgccatcattagaatgtcacccttctgggtttagcattgccctcgtcatctgcctgtaaaatgggattagagggactttttttctttgctccctggaggtcacatgcttgagtgccttctccttgtagactctgaaaggaggaaaggcttcccctgggatgccaggctgaggaactgggccaggaaggagggaggagggtgtgtcagctctgccctgggaggctttcctgtttggcacgaggatgactctaggcaggtgacctggcctcccagggacctggctggctggctgaggaacggtttgctgaccacacagggatggggtctgttttctctgaattctgagccccagagttgaggggatctgctcatctatctggacagatcctgccagcctcctaggaagagagggaggcagggttagtggaaactgaggcacagggaaaacattgctgttggaagctcaccagccttcatggttgtcaggaagggctcccttctctggcaggggagcatgggggaggcctgtccacggtgcccaagtccttgtctgctgagtcgaagtgaaggctgtggccaagcctgaggcgggcaggctagagctgaggtggacttcctgacaagtagacactgggccttgttagctgtggtcagcacctggcatctcctgtgccccagcctggtgttcagagcctttgggaacacaggacacggttcctgctctccaggaaataaacgtgagccatgccaggtgtgatataatgaggtcctcctcccagaggaggtggtgctttgggagggttctgaaatcttgggcggctttggccgacagaggagaggatggccttcctaaggtggaggaggagaagtgggttgaagccaggttgggaaaggccttggctgccaagctgctgagtctggccttgattcagtagaccctggggagcctttgaaggttatagggcatgggggcaattacttgattagggcagtggtctataaaagtgcttttcaaacttgaatgcacatagatcacctaggcagcttgttaaaatgcatgtctgtcctgtctgattcaccaggtctggggtgaggcctgtgactccgcatttctttctttctttctttctttttttgagacggagtcttgctctgttgtccaagctggagtgcagtgacaggatctcggctcactgcaaccttcgcctcctggatttaaacaattctcctgcctcagccttctgagtagcagtagctgggattacaggtgcccaccaccatctttagtagagacagggtttcaccatattggtcaggctggtctcgaactcctggcttcaagtgacccacctgcctcagcctcccaaagtgttgggattacaggcatgaaccactgtgcctggcctgagactgcatttttaataagctccttggcagtgcaatgctgctgctccatggagcacgctttgtatagcaaggatttagactggagtcttgagggacgagtgcagttcaggtgggtggaacagggaactaactaccttggctcctgaggctcctgtgttgcgggatgtgtagggagctgccggggtagggggtgggggtggtgcaggtgggctgggggcaggacagaggggactgtagaagatgtgagatgcaggggccactctgctgggagctggggctgtgtgagggcctctgggtgcttgggtcatagaccaggaacataggtctgatttccagggcctctgactgtaaggagctcccaagaccacgagggggtatcttgggtgactgtatcccggggcagggtgacatgcagacagcacggagggcaccttatctctgtccacagccgagcctggcactgtgggcaaccaatctggggtgagcacccttcctccagccagggcggggccgagagattggggaaacagctgatccggccctctagctccagctgtgacgtgtcctcatagaagacggtagtctccccagctgccgggccatcaccccagcgtgtgcagtgcctgtcaccctggcccaagtccttgttgctgccgctgatggttacgtgagctgctgtcactgatggttacatgagctgctgtcgggggtcttatcccactctggccacctctgcggcgtacgtgggagtggggggggcctggatgcttctctctgctctgccctggctgggccactacaggcaagtgtctgctcctctctgaggtgtcagtctcctcatctgtaaactgaggggttcaggtccctccaggggggttatcacacggtttgctgggtggggcattgcctcttcccagagagtcagcttaacacattttagtttaatattaaatattaaagttaatattaaaactcacatgctaatgatggggtcgaattagcaatttgcttggaaaaaaccatccgggttgttttgggggtctcccaaggccccttgcacctcaggctctacatggcctggggtgcgtatctgaggacactggtgggttgagtccccccagttgctggaagcggggtagcagtcactacacccaaaagaaggtacagagggcagacacaaagggcaaaggttccactgccctgggcagtgccatgaggggctggcagggtaggggttgactggctctcagtctgagctccccagatatcccacacacacctcctcaaaggagggcaaggccaagccaatcacaccccactttgatccctgcccctgggccaggccgtcctgcgggatgggaggggataacatttctcaaagactgttctgcgcaatctcaagcgttcaggggacaaataagggtagaaactggcaaattcactccactaccctacgggagattcagaatacatttaagagaattaaaggtcctgacaagtcctgtagaaaagaaactgtttagtgtttcccagcctgatctgaccgtggaaatcttttttttaaatgactgccaataatgtcccacccaccaggaaaacacctgctgggaaaagctgatgtggaaagatgctgctcactggaaggccacgaacatggtagcacaggtggacttcctggtagaggtagacttggtgggatgggcacatttggacaatcagtagaagaagagggcactgcagagagagagatgccaggctcccctctgaggcctcagtttcttcatctgtaaatctttgccccccatgtctgcctccccaccttcctttgggtgtagcaactgctacccccctgccagtgcctggtgggacctcaactgaccagggccctcagatgtgcccatcccacctctaccaggaagctccctgccatccttccttttctccctggtatttctgggccgagagccagccctgggttcttgtggcaatggctctgcctcactgggtgaatgaggaaggatctggaaggacctgtctggtgcctgggatccccaggtagctgggcctgggtcttctggattctttttcttttttttgagatggagcctcactctgtcacgcaggctggagtgcagtggcgcaatctcagctcattgcaacctccacctcctgggttcaagcaattctcttgcctcagcctcccgagtagctgggattacaggcgctcaccaccacgccctgctaatttttgtgtttttagtagaggtggggtttcaccgtgttgcccaggctggtctggaactcctggcctcaggtgatctgctcaccttggcctcccaaagtgctaggattacagatgtgagccgctgtgcccggccatcttctggattctgagagggccttttccttatacctcccgggcatttcctcgctttgcaagttctccccagcctttcatctcagaggttaacacagcagggttgtgaactctggacaataagctaagcctctctgtgcctccgttccctcatttgtaccatgagggtaatattacctccctcctagggtggctgggttgttgtgacactctaataccggttggctgctcttactactggatttgacatggctggaggagggaccctggggagggccctgtcatcgtggacatgagggaagaaagcaagagccagcagaaagcggcacaaggcttaggttggggtcctggttagaccagagtagcctgcagaggagaagaaagagggtgtgggtagctagcaggactggcttcctggaggaatggccagttaggtggggagatctggacagaatgagaagtcacaggtttgagtctgagagtcagaggatcctggtgggtgtgtgtaggggacaagtggcctgcgggcagggaggaggcatcagggactaccttcgttcactgggctgtggcagcccacagaaggttttgagcagggcagtgatgtgatcagagcagtgcattagtgagacatgaggcagggtgtgagtgatggtgggctgtgggagggggcggtgctgtgccccttcatggacatgaagctgggggaggggccaagttgcggacgtgaccctcattctcagactctcagggcagtcagtgaggctaccctgcctcgcctctgccacacctcctttcctctgtggtgtgaggctctttgttcagcagctcaggtgggggagatgggctgtggtattttttattttttattttttttgagttggagtctcgctctgtcgcccaggctggagtgcagcggcgcgatctcggctcactgcaacctccgcctcccgggttcacgccattctcctgcctcagcctcccgagtagctgggactacaggcgcccgccaccacgcccggctaattttttgtatttttagtagagatggtgtttcaccttgttagccaggatggtctcgatctcctgacctcgtgatccgcccgccttggcctcccaaagtgctgggatgacaggtgtgagccacagcgccggtcggggtgtggtattttaaatacccaggaggagctacggtggtgcgtggggcaacattggccctccgacctgacccgaaggccctggtggggcatgctcagtggattttcctacccagccctagctcccctctcttgtcctcctttgcccctttgtctttcttcctcaagcatgtaggagcccagtgctctctaaatctggggctgggaggttggaggatgaggaaaagcatctggattcaggtggagcatggtggcctagctgggggcattgcagcaccccttagtccagattcccttcttctccacctgcttcttgagggacggcattaaggaaggtgtgacttaaagtcagaagaacaagaacttggaagtgagttgcaatttattagaaaacagaacaaagaatctagccacccctgccaactctgtgctaggccctggcagacacatgggtcctgtcttccccatgcagccccgggggcctgagtgaggcatgatgggtctcactcagtttctgggacatctgtctcgatgccctttcgtcaaccccatggctctctcagagcctgtcctcataccttcaactgctccccacccataaccagatctccgggacagcccagctcagccagcgcacctctgatcctggcgggtggtggtgatactccttgcaggctgagttggctagattttaggatgactcaagcaggagacacccagcaccaccaaggggcatatattcttaggaaatatttttaaatgatgcctttaaatgttaaacacacagggaccttttactctctcttattttggaaaattaaaaaaaaaaaatcatacacaatgcaaaaccttgagagttaatctgaaaaggtttggagtttaaaaagtaactcaaggaaagataatgaacttgacttcttcattagatttttttttgtttttgagacagagtttcactcttggagtgcaatggcgcgatcttggctcactgcaacctctgccccctgggttcaagcgattctcctgccttagcctcccaagtagctaggattacaggtgcctgccaccacgcccggctaattttggtatttttagtggagacggggtttcactatgttggccaggctggtctcaaactcctgacttcaagtgatccgcccacttcgacctcccaaagtgctgagattacaggtgtgagccactgcgcccagctgcttcttcattagattttaaaaagagcaaggcctgaggcttaatatattactaagtaaaatttagaggcaggctgatagcaggctgtggaacctctctgaatctcagttgcctcctctgtactatgggggtattgatgtgaggattgaggtattccacacaaaatgcttggcactgcactctgtatctcaggtgtattcagctaaaaatagagtgataacaatgatgataggattttaagaacagacctttcttgatgcttcaaaagctagtgagttattctctctttgaactccacaaaagggcctaaagaatatgtttatgtccaaactcagcgtctccacttcataggggtcttatggatgaaatcatgggcgcatggcccctgtgtgcattctgaaatgaaccccagtggcttttgagacctggttccagccctcgcgtgggtgggggactgtgcttcatggttgaattctatggaaagtgctttattggttaatcctgtggtcttcttaggagagcacagttaatgtaccctgaagtcaccaggaggggaaggtctcgggccagtgatcgaggaccgtctagaggcagttatgagttacttgctttttgaattttcttttgtgctggccaatgcaattagaacttgtccctggccctatttatggaggaggagatcgagggtgaaggactgaggcctggctagtttagtgcctggcaagcctaatccagctgcatggggcagggagaccagggtgacctgcagggaccccactaagcgcccaggccagaaagcaggtagcttcccggtggcagccccaggctttggcagtgaagctggagtgaaccatcaggccttgagatgactcctgccagccccaagtgcctggcacagtgtgtgcatatcagtatgtggggaggagtaagatgggagaatcgttgagccagggcagtcctcgggcctgccgcacccctggggaggctgagtaggggggcctgaggtcggagcagggattgagcagtgttgccctgccctgcccctcactccatccaggtggcgtctgtcatgcctctgaacctcttggggcctgtttcctcatctgtaaaatgggcagcagagagtttatgagtattaaaggatgcagtgaatggaaagtgcccagcaaagggcctggcacaggaggggcaaaatagaggtttgctgtgaggttcatctggtgactcgatttttctttggatattttccttttttcgttttgtgatcatgcatgccaccttggctctatgataaattacgttgtgtggacaccataagagaggtatttgtgctggaaaagggtttacagtggaggaaggcccgtctccaccttcagggaggaaggctgcctggatccagcacggctcagacagctctgacactggggctgtcgtgtctctttgtgggcagaaagcacaggtcccaggctgggcagagtgggaccctgtggctcaggaggcaggatgggcttgccggagaccccaccccctccccggggctggagctgaagcacagttgggctttgtgcagagtcacgaggggccgctgagggggaactgcgcccggctgagctcacaggcctcagttcttgtaagtggttttgaaagagtcagcggaaagtgctgactgagctgttctccttcaccccagaattgtgaggctgcggctcctggcagggataggggagaagccccaccgggaagccaccccctcagctgccagctcacacctcccaggtgtcaagtgcccaggctgcagaatgggtggatctctgtgctgggtggtgctggggacactgactcacgtcagggccgtgcctgcaggtgatgcctcatgcagggggctgtgtttgggggtgtgcctggccctgtgatggcaggcggcttggagaagctctcccaaccctgctgatagcccggaggagagaactgggcttaataatcagacccctgggctgacctcccctctgcagtcctgcactgaggtatttggcttctgtcatttttctgaccccatcagcttgttgtgaagggcaaagatgatgaccagttgacacagttagaactggtctgggtttgtcccagcggtgtcatgcctggtcacccaggtcatgctgatgtggcccttgccctcaccccacatcctgccattcagcaagtccccaggaggttgacacagcactgcacctcctctgccgcagagttgccttggcaggaggccttccctgacgcccctgtgcaagcagttagtttcctgtctccccgccctgcttttccctgacctgacagatccttaaggggaggcgtctgggtgttgcagtatccccagtgcctcggacagtgcctggcacaggtagccctccagaaacctttttgaatgaacgaaaaatctgtcccctgctactcccgtccctgccttagggctcactcacaaaccctgtctgtgcttttctccagtctccttagcactggtcccaccctaggccgggaacgtgccccccgcctgcccggtgcccatccagactcccactcacggcggcagccaccgggtggcagggcctgtgtgtctccagcgcctgtgcctgccccgcccccttcctggtgccttgggcggcaggtcgtgtgcctcctggcaggtgtgcctcctgcccttccccagggtgcctcggggagccaacctgcatggctgacttgcccaggaagcgcagggcggcccgggtggggctggggcaggccctgagcggaggcgggaggtgtgttctccccacctgacgctggaaggcttccccactccccactcccgactcccaactcccagggcggggtgaggcggctgccacagtcatgggaggaagctcaggagagtgcatagtgtgggaccaggggattccaagccagtccaggtgagttcccggagagagagaaaagggacagtgttggaatcacacgttgagagatgatactgttagcagtgcctctgagcctctgcacgtgcagtttccctgcgtggagctcacttctctctcctgggaatttccaccccctcttccaccctccattaggtcttccttcccattgtctcttgaattcttcatgatccttatttctgtacctttgagttcactggctgtgagcctcagggcagggggccctgtctcttgaatccattgctgcggaatctccaggggctgatgcagggccaggcaagggtgcatcttgggggagacaaaacatacaaatataggtctctctaaggacttctgatgaggaggcttggacccagcagagagcagaacagatgtgatggtcattcccattttgcggatgaggaaacggtctttccaagatcactcagagctagaccccattcctgcttcctggctcctgtcctccaagggagcagtcccagcgcagaggttggacctgcagagggtgttgagatgcagagagaaagacggggaggatgcggctgtgtgtgtcggtgtgtgagcaaggttgggcaaggacatctgtgtggcctgaggtgctttgtatgcctggagagcagagggctttgggagctgggcagcagcggggtggagggagacccaagcctaagcccagggtggagggagcttgggcactgcctggccttgtggctgtctctgcctcttcctctccggcactgtcagacctcagtggctgtgggctggccaggaggctgcaactggaacctgagccttggctgtacattggcatcatgtaggtccctaaaaaaaaaaaaaaatacatggttgggccccaccccagagagtctaatttagatgacctggtataggtaggggttatttgtaaaaatctccaggtgagtctaatgtactggttgggagaagttcctgtctcttgggccttataagctgtagggcctgggccaggctccctgcccacttcatcctagctctgcatttcagaacagcggggtctgaggccctgagaggggttggttgggggagtgtttacctggggacttccactctggggagtctctggggagagagagatgctgactcttagttacctattgttggctaaccaatgactccaaaactggtagcttaaaatggcagtcagcatttattatgctcacagtttctgtaggttgggaatttggtagcagtttagttgggtggttctggctcggggtctctagtgaggttgcagtcacagtgtcagccagcgctgcagtcatctgaagggagcaggaggatttgcttccaagatggtgtgctcacatgcttggcaggatggtttggctgttgatgggagggctcagttccgtgccctgtgggctgccccagggttgcttgagtgtcctccccacatggtgactggcttctcccagagtaagctgcccaagggagcaaggtggaagccacagtgtcttttatgtctactttcagaagtaacattccatcatttctgcaatatcctgttagctgcaatggtcagcttgggagagaactacaccaaggcacgaatcccaggaggtagggatcattgaggggcatcttagaggctggtggccacataaattgtcctgttgttgcacctgcagcttcacaaccctagcctgggagctccaagcacccctaccaagtaggatagtggggtgacccttctatcctgatcccctgttcttcccattgtcattccataacagtgtctctgtggggtagggtggctctctctgaggcctggggccctgctctggaatcattctgcagggggatctgtgatctgtctactggctgggcttccttcatccccacccctgcctgtcacccggcccgatcttccctgcagtgactaccactagtgtgcagactggggcctgtaggaaaacataaggactattgctgctacacatctggctctgggataagccatctgcatgcgttgtcacacacctctgtggggcaggcacactttatccccattttactgatgaggaaactgaggcttagatcactcatctaataagtggtggggattcaaatgactggtattcaaagccagcgtcagaccccaggacctgtgtgaaagctgtggtactataaggtgttcccaaaggataggactatttattaagttgggtcgtcaaatgaaacataaggaaatatgctttcatgatttgtgtgtgtgtgtgtgtaagagaagtgtctcttcctggggttcgccgaaggctgtggtgacttgggtgcctcaaaacagggctgataccttggtgttgaagctagtattccctctctgggtttcggctgtgtcaggagactttttttctaaggaagcgggcagctgtgagcaccatcgcctgttggccctcccctgccagtggcctggtctgctgttaccaagggcagtcttgcaccaacgtattcaccagggcagtgaccggctctgtggtgtttttttctttagagacaaggtcgcccatagtggagtacagtggcatgatcatggctcattgcagccttacacacctgggctcaggtgatcctcccaccttagcctttggagtagctgggactccagttgtgcatcaccatgccttagctaagttgtttttttttttttttttttttttgagacagagtctcgctctgttgtccaggctagagtgcagtggggtgatcttggctcactgcaacctccgcctccgaggttcaagtgattctcctgcctcagcctcctaagtagctgggattaacaggcacgtgccaccacacctggctaatttttgtatttttagtagagacgggttttcaccatgttggccaggctggtctcgaactcctgacctcatgatccgcccgccttggcctcccaaagtgctgggattacaggcctgagccaccgcacccggccctagctaacttttacatttttatttttggagagatagggtcttgctatgttgcccaggctggtctcaacctcctgacctcaagcaatcctcccacgtcagcttcctaaagcactggaattacaggcatgagccactgttctgggcctggtctttcttacacctttgtggttgatgacttcctggaggggaattcagagttgggatgttaggtcctgctcacagggagggaatccagaccatggggtcttatcctaagggccactaaagggagctgcagtagactttgctggggatacaggaggctggtgaataggttcaggagtcagggctggcctctctcagggtaggggtgattttccccatttgacaaatggggaaaatgaggttcaagtgctaacagactctcccaaggccacactggttagtggcagaggctgctgctgggcagttcatcttctctaggaacatctggagtggcatagtcctcccagcagatctctggttgctgagggggcatggagcttgcctacctctgcaagatctggaatctgaggggaagaatgtgggttctgcctgctgagaggtgactatctatctggcaagccagggacatctgcagatagacatacacaaagatgggaagcaaggcatggggtgtgagaaacctggaggtggaaacttagctggtggggctggcccagagcttgaaaagttcacaggaggtgttcagagcaattgtgcctagcgcctgatctaatctgttgtcagagtgtgatctattgtcagagtgtgatctattgtcagagtgtgatcgagttgctaatttttgctgaaggtgggacctatagggtgaggcttgggatgaagctgcaggggtgtggcctggggaagtaactgcagtaccaagctctgttctggcccatctctacctgtgtctctctctgatactgtcatcaaggccctcagtgagctttcggaaagaccctgccctttgtctgacttcttttttttgagacaaggtcttgctctgtctcccaggctggagtgcagtggtgtgatcatggttcactgtagcctcgacttcctagactgaagcaatcctcctgccttggcctcccaaagtgctggaattacaggtgtgagccactgtgccctcccagcctctctggcttctttctgagctttcttcccctcctccacccccagttaggtttctagttgagtagtctcctgggtctgcccctacagggagctataaaatcaccttatgcctcccaggcaaaagggtcctgaaacaatgaacctcggtggtatgcaggacaccaagggaaacagagatggccccagagtgctcacctctcccgggggcctcccgctcttgcctcccagtgcctgtgggggccgtgtctttggctctgtccctccatgcactgaatcaatggctgcttctccttgcaacacatgcctgccaaggccccctggctcccttcttctcatctgaaattcgcttacaaagcctttttaaagttgtgcttttagggactttatgattttagggaagaaatgtgggtagcaatgacaatgtaattggaaagaagtctgggtgccaggcaggatgatggaggccttccctgtttttggcctgtgagggccaggggacattgctgggggcgggggctctgctgaaagaggctcccaagcttttccctttcatgagcttggagctggctaatggccaccacctctgatgccccttcccctcaacaatggggaggatggtcaggctgagtcaggattgaggggctcaggccgagtcagtattgggttggggtcagtcagatacagatgtgaggtgcctgcatgatgtcagtgtcaaggtccagcctgatagtagggttggggccaaggtgaaggctgggttctgagctcagatgaagattggggttcttctataagtgagacagagctctgggccctaggaaaggtgacttctgtactggtctctttggggatcttcctccctctcccgccctctccgagatgacctttgcagtggccacaccttttacctgtgctaatttaatattcctacaagtcggctgtacctatccccattttacggatgggaaagcttgaagaccaaagtgagcctttaaatatcagatagggcttggacaagtgtgcccaggtagtggggtacagagggtgcgtccttggagtgagttcagaggtgttggccaagtggggcctggagaagggaagacactggcccaggggtcacctggcaaggtagagattgagctggggcctgattcccaggtctgggccagtgttctctccctcctcttctgtctcctgggttcatgagctgcccctgctctgttccccacacctgtaccccgattctcccaccgtggcagcccagcctggcccagcagtccttttacttcctggccagcctgagtgaggaggctggggagggtctggctgggaggagttggggcccagcccctccctggttgaggggtgggaggagcctcaccgcagacacagagcccctttgtctgggccgttgtgcaaagcagctggtctgggatttctgggcgtttttacatttgaagaataattgcattgtctggggggcctcaagaatccaaatccctccccagacttccaggcagtccaaagatgtgcccctggagcagctccccagcttccctcccactccctctcctcctgttagaaacctgagaaagagcggggtaggggtgggggggtggggagggggcatggggaactgaggtggggctgctgccctcagggaccagaagtctccattgggaagagaggtttaaagtccccaaggctggtcgggggcaagtgagctgtcccctgctgccgagggcaccacagccctgaacaggtctcatgagcagatgtgcggttggaggagggaggaggctggtggaaggctgggtctgttttggggcacttcagctggtggagtcctgggccccaaggggagccaggcaaagtgagccaggtgggccaatttcctgggagcctcactcttcttctctgggaagcggattaggaaattcatccccgggtgaccttgagaaaaaggcagggctcaggcacacttgggaatagcctgtgttcggagggggccagagatgggtaggagttttgtctctctctctctcttttttttttttttgagacggagtctcgctctgtcacccaggctggagtgcagtggcgcgatctcgactcactgcaccctctgcctcctgggttcaagcgattctcctgcctcagcctcccgagtagctgggattacaggcacccgccaccacgcttggctaatttttgtatttttagtagagacagggtttcaccatgttggccaggctggtcttgagctcctggcctcaagtgatccgcccgcctcggcctccccaagtgctgggattacaggcttgaggcaccatgcctggctctctctctctttttaaaattaatgctctattttattttattttattttattttattttattttattttattttattttattttattttattttatgttattttattttagagacagggtcttgctctgtcgcccagactagagtgctgtggtgctatcatagctcattgcaaccttgaactcccaggctcaagccatccttcttcctcggtctccagtgtagctggggctacaggtacatttcaccacaactggctaattttttaatttttatttttttgtttatgtttcagacagtctgaatatgtttgcaatttttaatttttagtagaaactaggtctcactatgttgtccaggctggtctcttaactcctgagctcaagtgatcctcccaccttgcctcccaaagtgccgcgattacaggcatgaaccacctgtaatagctctggccacacctggccagatttttatctcttgtgaggggcgtcttggaagggtgtggggtacgggaggctggcctctcctggcactgttttgtttcagtagccactcttggagagggagtgatgtgctgatttttgggtgatgctgaggtgggcttcaatgttaaagaaagggcactgcacacccagctgggtgattgattccactgtggttcactcacagggtttggccgcgctcaccttgggcaggggctcgccagtctagcctgggacctcagccctgccctgtggctgtggggcttcagcctcattcttgagataacagacaacagaatttcctggggtgagatgcctgtgctttgggggtaggctgggggtcaggtgacagtgcagaaccagtacgagggactcacatttcaagggtgtctgttgcttcaggaaacagtaacggagcaggccttgctggtggttcgagcaacacccaccccgaaatcacacaaggccgtgcatactaagagaacccagaaccagcttctctgatgtgtatgcgggaggctgtttcctgcaggccttcaggtgggcggggctggggaggctccagacttttggtgaagttgggggtctgtgtgtatgttttggcggggagttgtgattgagaactgaagctagaaaggccagctgggtccagagggcaaggctgacatgcagagatcttccccaggcctgctacatagtaggtgctcagtgaattgctaaattatattccctggccagcgagatgcccagctgtgcttatccttggagggtggggctgggagattgagacccgcatgggtgaggctcacatagaggaggcggggtgggggggtgcttctggcgcagttgggggtggaggtgacatgattcaggctgtggagttgccatggcttgacccgatgtatgaggagggtctcccactaagggtgactccagatttgagcctagggactgcttggtggtcctgtaatttgccctcaatgaggaaagtgccaggagttgggtggtgcctcctgtttagttctgggcatttccaggcggggcttggcagggtcagacgttggagaccaggactaacgcgtgtctctctagtatttggccattagaaggtacttgctggagtgtaaatttcttcacttttttttttctgagacagggtctcactctgttgcccaggctggagcaccatggtgccatctcagctcactgcaactagagcgtaaatttctgagggtgtcaaaatgaaattggggaggatgttccagggatgggatgaagaagtggcagttcacacaaactttggtggctcgtgcccactctggtcacctgacctctgagtctttattctattcatccgtctttggcaaccctgccacaggacggggtttttcctccctcttttcctctctccataccctgctgccttcctgtgtccaatgtggcctcttgggacacttcagtcagggtggtggtggctctggacagctgggggaggcggtggcctgcaggctggagaactggctgcgtggtatcttggatgaaattgccaggggaccggggggtgcactcatgccctggctggcctgatttcttggcactcctaggcattgcctgcttggggacatggagaataacctcaaggcgtgggtgcaggcgctgggcaagaggctcacacccccactttgccatggaagcaggagcaagaaggcaagtgtctgttgcccgccctcctcctcttccctgcctggctgagccagcacttttttcttctctcctttatctgctcagaaagtacagggtgttctgtttctcctgtgcatacagatcaaggagcggatgttatttctttctttctttccccaaggcgagagaaggacagggcaggcaccgagtaccatttaagtgattctccttcctcagtaaggcagtttctcatacattaaaacaaaacaaaacaaaacccagaagggaaaggaaacgatgacacaaaccaacagaaaacaagttgccccttagtgcccccactccccagcaggcatttagcacacagtaggtgtcctggctatgttctctctctccctttcagttggaccacagggtgtgctggctccatgggatgatatcagggccacaggacggactcatttctctgccctctgtgggctgtgtagggggctcctctggcttcctggaggcattggggattgacaggcttatctgggacagggcctgaggagggacaggaccgtgggattagctgtgagggtcagaatgcaggggactcacgtggcccctgcttacttgcgtgtcattccatgtgcgatgtctgtttgagttcaaagtctctgagaccaggtgcagggagctgggggttctttctgtgctgatcttggaggcagagtggctgcctgcattcattccacggtccattccacagcttgttccaaagacagtctgctcatgatgtagcttctgcacttgacaaattattttcatgcacgaggcccttgaaaatgttgacagtcttgtgacatccatggagggccttatttgacggtcacaaaggagcggtgaggacaagcgggccatgcatggctctgggagcagggaaggcaggtagctggctgggacggccctgctggcaccgagcgctgttcccctatcctggcttcccaacgctggagcttatctggtcccctggttttcagaggtggtgctccagggagcctggggtgagggggacccccagtttaatacctgctacaccctgacccccatagcagctttttaagaaggggttccaccagtaaggcgtgagagccactgcagccatccctttccgtagtggataggagactgtgtgtggggtggcctggggcagacccgccgggcgggttgcggcgccacgtcagtccagggtgcccagggtggcggcgtccccgtcgcagctggcgcggcccctccggagcacgccgcgtgtttaccgacctgacgcagcgtcccggcccggctggcagacatccggcggcatcgccgctgaccctccccgcccgccccgtgcaggcggccacatcctcacctctaaatttagtttgcaggaaggagaacctggggtagggtgggggaggactggagccagccctgatccgtgtcctctcgggagggaggcaggacctagcatctctggggcgagggaggagagggacgggagtcagaggacagaggcggggaggaggaaagggccggagccgccctgctcccggcgtggcctcatccccagcgaaagcgcgacacccgctgtctgggaaggggagcgggagcccttgcctccgaactggacgctgcccggatgtggctccgggtctcgggcgccacctaccggcccttttgggaaccgattctgcacggagttggcgggcctgggtctcagggggacttggagggattttaggggctggagggtgggtgggtgggagggggggtggtggagggaggattcccgtccaggcccaggcatcgcgggggcaggtgcaatgggcgggggaggcacaaagagcagcttctcagcctaagcgtatttcggaaaaagcctcctttgttcacccatgtcacttaagggatgttaaggacgctgcggttccaagtgggatagaaacctcagtggtcagaccctgaaatgcatggagaagaaagtcagtgtggcagcctttgacggattgattggagggcaggaatgactatcttgttagtgaggtctatgtagatacatacagtgaattacacatatctcaactgtgcagctcagcgaatcttcatacgtgcactgggtacccacccttcagattaagatatttattccgtctaccccagaaaggcccctcctgcccccttcagtcatctccctgccttctaacctctcttctgacctctggcttcatagattgggtttgcctcttcctgagcttcgtgtgaatgaagtcatacagtccgtgcccttgtctctggcttcttttgctcagtgcgtgattgaggtgcatctgtgtggttgggagtgtcagtacttgggttctgtctactgctgaagaatagtccgtggtatggatatgctaggtacagcaccgcatatgtctctgttctcctgctgatagacccgtggggtgtttttattttcaggctgttacgaatataggtgctgtgcacactctttaacttgtgtctttggtggaatgtgccctctttctgttgggtgtattcttaagagtgggattgctatgtcatgggaacagttatgcgcagctttattaggtacgggtgacagtgccccttgtttgctgtccggcagccaccttccgcccacatttgttccctgttagatcctggatactgttagattctgcaacttttgccacttaaaccccagcaaagacaactggaatctaaattgcttgaatcagggaaggaacagggacagcatctgagctgagtggttcctcagggtggcccccagatatctccaaaccctccgggtcattctgggaagagaaaagcagcctctcctagccctggggccagatttggggacccccttggcctcccagccatcagctcccctagtctggcgtctctgagcaaactggcttagtgtaactgtcaatttcatgtctggcctctggtgccatgggtcctcttggtccactgtttcctgggctccttgctgctttgtggtggctgagggactgggtggctgggaaaacaacctacccggaatagcaggcttgttggatgcaggcctcgtggcactttcttgggggagggcgggactatgtcctgcccaccaaattgccacttcggtgaggctgtgaaagaccaacagaaagccagagacaagagaaggggcaagggaaagagagagagagtgccagggaaaagccaggcaaaggagggagagcagagggtccagggttgtgtgtgcaagtatcctgggatctgtgttgagtatcctgaggtttgtgtgaatatcttggggtccatgcaagtatcttcgggtccaggcaagtatccggggtccatgcaagtatcttggggtccaggcaagtgtcctggggtctgtgtgagtatcctggggggtctgtgtgagtatcttggggtccaggcaagtatccggggtctgtgtgagcctcctggtattggcaccaggtggaccacagcagttatgccatgctgagctggtccagaatcagcagccccaagctccagtctctcctgactgtggccttcttggtcatctcctcactggctgcctctcatctccactttggggcctgtggtcagggaagaagcagggcctaacaagtttgggggtgggattgagaatttcaggggcttaagatgggctcccaggtctcctgcctgctggcggggacccaaaatgcatccctcccttactttctccttcccttccctttcttccttttctcctcccttcctgccaccttcccttatttattcttccatccctccctgcccctttggaggtggctcttcttgtccaggtcctcagagagggagggagaggactccaggtccccccacccacaacagagggcagagtgtgatgaaagccctgagtgtcccttggggcaggtgggaagtgaaggcagagccactaagctgtgacacctcctccccctgcaggttcctagaaggtgagcgcggacggtatgcaaagttgtgaatccagtggtgacagtgcggatgaccctctcagtcgcggcctacggagaaggggacagcctcgtgtggtggtgatcggcgccggcttggctggcctggctgcagccaaagcacttcttgagcagggtttcacggatgtcactgtgcttgaggcttccagccacatcggaggccgtgtgcagagtgtgaaacttggtaagtgccacccagtccagcccagccacctccccaggtcacctttagtctcctaattcccggctctgcctgaaatctcattattttaacttctgggataaatgttccatcatgcatcctgcctgggcattttccagaagcttccttcgctcctcgtggcagccctctgaggcgggcatggtagggccctgactttcacttgtggagaatgctggcttgcttctgacctagtgctcacagtgtttaggagggagtggacacccaagctctcttggtactgagtgggcaagtttctatttcacaagaagtgaaattcttctgcaaggtcctagtagttgttaactttttgtgaatactaattgtgaattagtataacatgactgagagctagccctggagcagtaggatcctgggttagcagagatgaaaggggattttgggcctccatgtgtgtgatgggcaggtcttgggattatctgggaagtggatctgtctaggttgcagagcaatgaggaccctggagaaagcagccaggtaagagacttgccctaggggtgggcagactttgccagggatctcagagaatgggaaaattgcctgaaatccctaggtcagggcttcccaactggcgggggagggggtgggggggggatggtttctgaccattgaggggttgggtgggtagaaaccatgaaaatgacccagtgagaccacacatggcctggaatgtgtggctacattgatcctctagaggagtttttttttttttttttttgagacagagtctcactctgtcacccaggctggagtgcagtggcatgatcttggttcactgcaacctctgcttctgggattcaagagattctcccgcctcagcctccgaagtagctgggattacaggtgtgtgccaccatgtctggctaatttttatatttttagtagagacaaacgtttcaccatgttggccaggctggtcttgaactcctgacctcaggtgatccacctgcctgggcctcttgtagaaactttgatcaccttaagtgtcttcccctacagcatttcctgcaaggcatacctaaagttgtcccttttccccagcacacacaagagtgtctgcagggaaacagactccaccttctcatgggaggaatggcaaagtcacgttgcaaaggggtgtgtgtacaaagataggaggaatcattgtgactatcttggcaaaaagtgtgccacatatatcttgaagcaggcctgcaaaaacaaaacgaaacaccccccaaaatttctattttcctttcattgtttcggcttccctgggagctaggtagggatggggaggaatgggagaaggagacagtttctgcagcatcagaagaagaaactgaggcccaggcacagaggcaacttgcctcagagtatatgatgccttggctggggatggggtagtagacctagttcccaggccatcccaacttggacccacgagatgtcccctgccccagtccggctctcagggttttttgtactgtgtcaaaggatgtagagggcttcactttccctggaaatgtgctttagattgctttttgggggaatcttgcaaactgggatgtttggacttctctcctgccctatgctgaatttggagggagccattttctgtctgggaaatgctttagatcttggagccactggggatgttgaagaattgaaaaaggccaggtggggaccctcaggtacccacagtgcttctccccggtgaggaggcaccagtgaggaagtggggtctgatatctggtgttacctgagaaaaaggtgggacggaaaaagaagagccttctaactggtccagtaaggccactctgggacaaatcacagagtcatccaaggtggcagttatcttagctataaggtggttttcagtgggaacttttcactgaggaccttcgttggttgccagcagtggaagttcaagctctttcctgccctgttgtagggtggaaagaccctcttggaggaaggagggggaagcagtgctggccctctctggagaagtccctaagcctctaagggcctgctgttgtcaccctcaggacacgccacctttgagctgggagccacctggatccatggctcccatgggaaccctatctatcatctagcagaagccaacggcctcctggaagagacaaccgatggggaacgcagcgtgggccgcatcagcctctattccaagaatggcgtggcctgctaccttaccaaccacggccgcaggatccccaaggacgtggttgaggaattcagcgatttatacaacgaggtaaggtgtgagcagagtagctgggcgtaagggcatggggagacctgggaggtctgtgattctggtcgtgtctctgcacactccctgggccttgcatttggaaaaccaggataatgtgagggtaaaatgaaaatattcagtgggatagaactgatttttatatattgatttgttagcttgctaaattatttttaattctaataatacatctattatgttaattgtattaatttatattctaataatattttggaatttatgtatataactctacacaaaaaatgagaattttgtctttttttcctttctagtcattagaccagcatttatccaatagaactttccacagtgatggtgatgttttagaccttcgctctgcagtgtggtagtcactagccacatttggctcttgagcacttgaaatgatgcaagtaaaaccgaggaactgaatatttaattttttgttgttgttgtttgtttttgagatggagtctcgctctgtcgtccaggctggagtgcagtggcgcgatctcagctcactgtaacctctacctctctggttcaagcgattctcctgcctcagcctcctgagtagctgggattacaggcacgtggcatgcccagctaatttttgtatttttagtagagatggggtttcaccatgttgttcaggttggtctcgaactcctgacttcatgatcggcctaccttggcctcccaaagtgctgggattataggcgtgagccactgcacccggcctaatttcttaattttaaattgctacaggtgtctagtagctactgtgttggatagcacagctgtagacagttttatttttttcttgccttattgcactggttagtatctcagtgcagtgttggacagaagtggcaatggcacacatccttgttttattcagatttttaaaaaattattaatattgttagtattctttagctgtgtgaactgcaccgaacaagcaaagtaatgtgtaggccctgtcatctgatagcttgtcatttgtagtgtaatgaatgatccttcactccaggtcagtaatttggccagcaaacacctattgtgcattttcttttctttctttctttctttcttttttttttttgagacggagtttcgctcttgttgtccaggctagagtacgatggcacgatctcagctcaccgcaacctccgcctcccaggttcaagcgattctcctgcctcagtctcctgagtagctgggattacaggcatgtaccaccatgcccagctaattttgtatttttagtagaaatggggttttaccacgttggtcaggctggtctcgaactcctgacctcaggtgatccgcccaccttggtctcccaaagtgctgggattacaagcgtgagccacctcgcccagcctattgtgcattttctaatctcttgggcatgagaaaggagacatgacccttgctttggggtggtccctgctctatggaggacaggcacacttggtgtcatgtgtgtgcaccaacaaggtacgttgtgttgtgcattctcactcatgtgcaaagagactgaattgttaatgggtcaaataagaactagtattcttcaaaacagacctttcttttctgctggaaatcagccccagcctgattcccaggttattgtgagtgattcaaacatggatgcctcttgaaaatgactttcggggcccgtggtttgttcttttaaatgtcgttaaaagtagatcatcatcaaattctgctggtgggtttgatttttgaaagtcaagagagtgcgttgtggatatggagtggatatggtggattatctgggtggtgatgttttgagtcaaaaggataaggcgtaaccctgatgtcaagatttctttgtgtggcttttaaccaatcctagaggccattctgaggaggggtgctctaagcacgtgaaaccttgcctcagtgtggcttcataataagtatgcagcccccaaagatgatgacgttgaagagccactcatctgaatgtattttatttattaacaaatacatgagtttgtgcaatagtatcatctagagcttagtttctggagtaagactgccttgaccaaataccagttctaccatttattagctgtggaatcttgagcaggttattgagcctctctgagccttactttcctcttctgtaaaatgggcatggtggtacttacctcatagtattatgaggattgaatgagaaccaatgataagtgcttaatgagaattggggtgagtattattagctgtcacagacctgtccgattttccttgggtcacattgggaaggtgtcgaataacccaggagaggagactgtgccatgtgatacacccatgttcggtgaaggctgccctcgttggtggctgatgcaaagagtcatgtcgatggactaaattcattactcctcagctgggcattttggcctctagttaacataagctaaggactggctaccaggttgcttatcgcccaagggaaaaacccagggaggaggcaaattgaaagcctgacccttggcagtggtcctgggtgaagaatttgctgaggactccagctaaggctcaccactcagcatctcctgattgcagggaggcaagatgaaacaatttccctcactttcttctttataatttagtctccagagataagtttaattcatgtctgtgtctcaggtggaggccttccccttgagtgagatggtggtggtggcgggtggtggacatcactgtgctttgccatcttccttcaccctgtggccccagggcctagcccagggctgggggacagggcagacaccattcccagacatgtgtgctgaccacactcactttaggaagggaaacaaaccattcatcagctcagccacaggggctcgaccaaggagcctccattagctggtgtcctgggaatgacagctgtgggcatgtgatcctgccgccttcttgctcacggccctccagcgatgccagggccttggatcaagtccagagtccttggaataactctcagtcctttatgccctggaccctgcctgcccttccaaagtcggctctcagatcctctctccttgctgccccctccagcaaaaccaaaccccttcaggattcctgactgcttctccatctttgaggttgctgttccctctgcctgaaatgcttttcttctccctttcctctccaccctggctgtctctcagctgcccagggttgtctgcgttgacctcacagccccgggttctttcctatcacggcagcccaatcgtggactgtctccccagctggagtgaggggaggggcagggactgtttcgcccacattacaagctgtgtcctgcacagagcccggtaaatgttgagtaaatgttgcttctggggatccctggactggcttacttccttcagggagctctgcccagtgcttagtggggactgtatatgagacaggcacgagggtcgggcgggcagtcagaccccttttcaagtgactgatcgtcgttatctgttgatgaggtgtgggctggagttcttgctgaaacgtgcccgtgaaatgcatctcccttccttggcacactggggcctcctgagaccctggcttttgtgttcctgtcttccccactgcgtctcagcttccttactcgtggctgaggcctgaagcaaagggggtgctttgtacggagctgcacaggcccagggaggtgtctccagtcgtcaggggcccttctgctggccaggccacagctccagactgccctcttgggagcgggcaaagcagacacacttgggcaggggtggcagggaaagtgcacgtatcgttcttggaacaggtaaatgtgtgcaaatgcccatcctccagtgggaggtggagcccatggaggcccatgcagagtccatgaggggtggcttctttcccacagactgtatgggcaccaaatgtttcacattgtcctaagtgagggcccagcaagaaaacctccggggcttatcccacctccccgacaggccggaggcgaggaggtggctgcccggggccttggcttttggtgcagcattgagtgcaacatcggatccctaagggacagagaccaggggctcagtgcatccaggggacacctgggaactggtgggtttgggttgggggccttctgtttgagatggaggtgtgatgaggtgttttcagtctcatggggtctctctggcaggtctataacttgacccaggagttcttccggcacgataaaccagtcaatgctgaaagtcaaaatagcgtgggggtgttcacccgagaggaggtgcgtaaccgcatcaggaatgaccctgacgacccagaggctaccaagcgcctgaagctcgccatgatccagcagtacctgaaggtatcttgaggaagacggattctgggggcgtctgggtctgaggagggctacgctgctcctacccctgcccaaccccggcggtcacctggcttctccttgggtcttcccgcaggtggagagctgtgagagcagctcacacagcatggacgaggtgtccctgagcgccttcggggagtggaccgagatccccggcgctcaccacatcatcccctcgggcttcatgcgggttgtggagctgctggcggagggcatccctgcccacgtcatccagctagggaaacctgtccgctgcattcactgggaccaggcctcagcccgccccagaggccctgagattgagccccggggtgagggcgaccacaatcacgacactggggagggtggccagggtggagaggagccccgggggggcaggtgggatgaggatgagcagtggtcggtggtggtggagtgcgaggactgtgagctgatcccggcggaccatgtgattgtgaccgtgtcgctaggtgtgctaaagaggcagtacaccagtttcttccggccaggcctgcccacagagaaggtggctgccatccaccgcctgggcattggcaccaccgacaagatctttctggaattcgaggagcccttctggggccctgagtgcaacagcctacagtttgtgtgggaggacgaagcagagagccacaccctcacctacccacctgagctctggtaccgcaagatctgcggctttgatgtcctctacccgcctgagcgctacggccatgtgctgagcggctggatctgcggggaggaggccctcgtcatggagaagtgtgatgacgaggcagtggccgagatctgcacggagatgctgcgtcagttcacaggtgcgccacgtgccccacgacccgcttcccccaccctgcttcttcctcacctgccctcctctggtggacccatggcagctctctcctccccagaccgtgaagctcggatgctgtgccccacgggagagccactgcagggtgccacattcagccaaaggctcttcagttgctgacagtttagaacttgacacactcagaattatgggcgctgtgtctcttccccctttctaaaggctgatggtaaaacactcagagatcaccgcccattgtgctctgttgctaagagctggatttgccttttactctctgagtctttcagctcaacatttttcacccactattccaggaggacctcacgagaacccccgatattaggcggggaaacatgattatgtgtcatgtgttttcagatagataggaaaagtaaggtggagcgttttgccgggggtcacaggaggcgctgagtgggtacacagctcgagccccagcctccctccttcctcttctatcctccgtgcctacccctggcagtctggtcctcccggagccctggaggtggggtggggggttgtccctttggggtcatcttccatatgcagccatttcttatcctccctcctcttggcttttctgactctccatcagggaaccccaacattccaaaacctcggcgaatcttgcgctcggcctggggcagcaacccttacttccgcggctcctattcatacacgcaggtgggctccagcggggcggatgtggagaagctggccaagcccctgccgtacacagagagctcaaagacagcggtaagcggggcgtttggggtgaggaggggagttgtgggtgtattttgtatgtgtgtccggtccagggtgaggagggctagggtagtgttcactaaggggtgctcaggtgaggcagggatggagtagcttctgtaatgagagagaacacaaggaaaaaagtgtgcacttaatatctggaagaaaaaatggaatcaaattgaaacttaaaatgttttcttgatgttatgaaaactgagctattccatgctgtgctggccaatacggtagctatcagccactttcaatttaaattaatttattaaaaatttaaattaatacagtattttttttttcttttttgagacagggtcttgctctgtctacacttcaggctggggtatagtggtgtgatcacagctcactgcagccttgacctcctgggctcaagtgatcctcccacctcagcctcccaactagctgggaccacaggcatgccggcacgccaccatgtccagctaatttttgtactttttttttttttttggtagagatggggtttcatcatactgctaggctggtcttgaactcttgggctcaagctgtcctcccgcctcaacctcctgaagtgctaggattataggaatgagccaccacacttggccaatacagtaaagtttttgttccttggttgcactagtcacatttcaagttcaacagccacatgtggctagaggttaccatagtaaagtacatagcgataggaatgtcctattggacagcactgattcaatggaaatgttttcccaatatatttcagaaaataaagtttagattactgatgctccacaatatgccaactgtacactaaaaaaaaaaaatctgaaatatatatttatgctcccataaagtggattttgagtttcccccatcaagtagacacacacagtaaatgttaaaactcaacagttatatttaaaacaattatttggtataattggtgaagaagagttcagtcaaccagcatctactatgcctgcccaacggtgctcagatggagagagaaaagggctggtgtttaaagagagagaggtcctcagaaaggccctttctgctgccacagccatcctcctaaaaagcaaatcttctcttttcacttgcatcagttaggactagtgcatgtagcaaaaagcaaagcaaagcaaacacaactgtgacttaaacaaggaaaatcaaaaggaaatctggaggcaggcagcaggatcccgtatcattagcacctggctctcatcttcaagaccatcttgtggtccaagagggctgcagaagctccagttctcacatctgcatcttaggctagaaggaagaggaaaggcagatggcaagaagggaacccttggagctgagtcagctgtgtctctaagcaacagtgcactttaatgcttattggccagaacatagacacatgactgcacctagctgctacagaggctgggcagtatcatttttattctggatggcaatggacccagttaaaaatcaggactttgttattgaggagaaagaggagaatggttggatgtgggagtggtcccagctacttgggaggctgaggtgggaggatcacttgagcccaggaggtcaaggctgacacagtatacaacacccctttcagtgtaacagcctctgtgggctccttggtggtgggattacagcctcactactcagggtaggtagatcagtaccagcctcacctgggagctagttagaaatgcagattctcagcctggccaacatggcgaaaccctgtctctactaaaaatacaaaattagccaggcatggtggtgcacacctgtagttctagctacttgggaggctgaggcatgagaattgcttgaagctgggaggcggaggttgcagtgagttgagatcatgccattgcactccagcctgggtgacagagcgagaccctgtctcaaaacaaaaaccaaaaaacaacaacccctggcgccctaaacacacacacacacaaataaataaataaataaaaagaaatgcagattctcagcctggccaacatggcgaaaccctgtctctactaaaaatacaaaattagccaggcatggtggtgcacacctgtagttctagctacttgggaggctgaggcatgagaattgcttgaagctgggaggcggaggttgcagtgagttgagatcatgccattgcactccagcctgggtgacagagcgagaccctgtctcaaaacaaaaaccaaaaaacaacaacccctggcgccctaaacacacacacacacaaataaataaataaataaaaagaaatgcagactctcagcccaccccagacctgctggattaaaaactgcattctggccagggatgcaggctcctgcccataatcccagcactatgggaggccgaagtgggaggatggcttgagctcaggagttcaagaccagcctgggcaacaaagtaagacctccatctcaacaaaaaatttaaaaaaaaattagccaggtgtggtggtgtgtgcctgtagtcccaactacttaggaggcttagatgggaggattgcttgagcccaggaagttgaggctgcagtggagctgtgatcatgttactgcactccaactggggcaatagagtgagacactgtctcaaaaataataaataaaaactgcattttatcaggatccacagctggtgccttgcaccttgaatttgagaggaactaggataaagtccaaatgcaaacttggggtgcaagaacttgtaccttgcctagacctcacctagacagcctgctttctcaaggccgagccctggctgtaccaaaattctcactgtcccccgagcaaggcctgctttggtacatttttgcccccacctttccctctgtctgaaatgtcctttgcctgtccgttcactcagcatcttccgagaaccagttcaaaggtcctgtcctctgggaagctttgtgggatcccctgacactgggcctcttttctgggctttcggcgccttgtgcaaacacccattccatcacatatgacgctgtttagtaattgggtttcatgtctggcttcctcaccagcatggaagctccacaaagcagcagcctggtcaccttttctcttccaagtgcccagaacagcccctggatgctaacaggggcgccgtaaaggtttgtcaaattaccaccgactttattgagtgctttgttcttccaggttctaagtgctttagatacatgatttcccttaatccttacaaccaccctccgaagtaggtggtataaacccatttggaagatgagaaaagcaaggcttagggaggttaaaccacctgcctcaagttgacaagtaagaggcacaaagagcctttgagaccacagagccgggactcctaatggcctcaagacagaaagagccaagggaagaagcaggggaaagtggccagataggatgggcagctcttcatcctgtggaagcagcagcacctgcgtctcagagcctctctaatttgtcattgggatgggaggttctggtggagaggggtggccttgtggccttctggcctttgctgctcctccaccctgacctccccatccccgccccgcagcccatgcaggtgctgttttccggtgaggccacccaccgcaagtactattccaccacccacggtgctctgctgtccggccagcgtgaggctgcccgcctcattgagatgtaccgagacctcttccagcaggggacctgagggctgtcctcgctgctgagaagagccactaactcgtgacctccagcctgccccttgctgccgtgtgctcctgccttcctgatcctctgtagaaaggatttttatcttctgtagagctagccgccctgactgccttcagacctggccctgtagcttttctttttctccaggctgggccgtgagcaggtgggccgttgagttacctctgtgctggatcccgtgcccccacttgcctaccctctgtcctgccttgttattgtaagtgccttcaatactttgcattttgggataataaaaaaggctccctcccctgcccctcagcttctctctggttttctcagcctctgtgtatgtgtgtgtgtttatttctgtcacaccgcctttgagtgagagggagaaggttggggagccctggcctggctgtgtccccagagggaaggtgctgcttttactggaagggatgtcccctccccccatctgttggggtgtttaccttcctgccagtaaggcccctcaggaatacgggcctctcagtgtacacctgctccttcaggtctggcctgagtctgcttgctggcccttttttttgctggacttctctgagtttaactgagtgacacactgcctggagtgaaggagttctgtgggggggacccccagtggtggtggctccatgccaagcctaggtatgttcattgtttttttttttttttttttttttttttgagacggagtctcgctctgtcgcccaggctggagtgcaatggcgcaatctcggctcactgcaacctctgcctcctgggttcaagcagttctctgcctcagcctcctgagtagctgggattacaggcgcccgccaccacgcctggataatttttgtatttttagtatttttgtagtttcaccatcttggccaggctggtcttgaactcctgacctcaggtgatctacccgccttggcctcccaaagtgctgggattacaggggtgagccaccgcacctggcttgttcattgttaattagcgtcacctgtccactgggctgtgggtctggcccctggggtggccttcttttgaacctctgggcagatggtcattctgggctttattttttgacagggggaatatcctaaggcctgccatttattggggaatagatttttcttctcgtcagctgggttcagtgctcccaacactttgggaggctaaggtggcaggatcacttgagcccaggagtctgaggctgcagtgagccatgattgcaccactgcactccagcttgggtgacagagtgagaccctgtctcagaaaaataaaagaaggtgttatttgtaatcctttacatgtaagctgtcaagcttctcagtattaaggaataattcacacaccaaatataaagcaatcaatactttcctttacatactaggcatctagaaaagggtcctaggctggacatggtggcttatgcctgtaatcccaccaatttgggaggctgaggcaggaggattgcttgagcctgggaacttgaaaccagcctgggcaacacagtgagaccccatctctacagatgtcttttaaaaaagaaaaacttctttttcttctctttttgctgagtaaaaagacacatctacccccttatatatactcacccacatatataggtacacatacctacatatactcaccactacaccttacacataacccacatgacatatacaggtacacacacctacatacactcacctctctaccctacacatatacctacctacatacacacacacacagaaccttaaagaacagtcattttgttactccacatttctagtgatgaaatttgaattcagatccacatggctctgtccatgtggtttaagcccaaaagctatataagaatacactaaaatgtccccattcacactgtccccagtcatcttaaagaacagttagtcattttgttatcctagatttctagtgatgaaatttgaattctacagagttgaagggtggggtgatggggagaagttatgaagagcttaggtcaggtccccttcatggacatttagggccctgcccttgacaggacatgacagccccttcctcctcccaggtgattgattgattgattgaaatagcatctcactctgttgcccaggctggagacagcggtgcgatcatggctcactgcagcctcagactcctgggcttaaatgatcctccttactcaggagtggctgggactacaggcatgtgccaccatgcctggctaatttttatttttatttttttgtagagagagtgtctcattatattgcccaggctggtaggttgtgatggagatgtctaacacacagacacacgtacacacatgcttacctgcatccacttacgcacacacacctacatgcacaaacctcacagacattttgctttgccagggttgatctgccagaaatcttcatggagcttatatcaagggattcatacccacctgctggcataactgaaaaatgtctaaatatatatatgaattttttttttttttgagacggagtttcactcagttgcttaggctggagtgcagtggcatgatcccggctcactgcaacctccacctcccaggctcaagcgattctcctgcctcagcttcccgagtagctgggattaaggcacgaaccaccatgcccagctaatttttctattttaaatagagttggggttttgctatattggccagactggtctcaaactcctgacctcaggtgatccacccgcctcggactcccaaggtgttgggattacaggcgtagccactatgcccagcctatatatgaaaaattgtctgaatagatgatctgttcatgtagtttaagcccaaaagctgtccacgtggatacaatacactgaaatgttccctctcacagtgtccccagtcactgttgcctctcccacagccctaggggtatccattcctagatgtaagtcaatataaaaacactcttctccctcctttttatacaaaagcaccaaagtattcatcttgtcctgattttgcttgttttagttaacaatatgtcctgtaggctgggcgcggtggctcacacctgtagtcccagcaccttgagaggccaaggcgggtggatcacctgaggtcaggagttcaagacaagcctggccaacatggtgaaaccctgtctctactaaaagtacaaaaaataagccgggtgtggtgatgcatacctgtaatcccagctactcgggaggctgaggcaggagaattgcttgaacccaggaggtggaggttgcagcgagccgagatcgcgccattgaactccagcctgggcaacaagagtgaaactctgtctcaaaaacaaacagaaaaacaaataaaaaatcaaaaaaacccacaatatgtcttggacatctttctgtaatggtacataagcagacaatgtaaatttggaccttactttggtcaaagcatgtctgtctcctccctggcccagggtcactttatggaagccaccttctattacctgttaccttccatgactcatagtctgctgtctgcttctgactcctcagttgttggatttccccatccactgcagtgggatggagacaagcagccccatcacataagtatcggggaagaaagtgataaataggttctcagtgtataggcagaggaattttaaaggactccatggtggggtgaaaggtctggaaatgtttacttggtgactgcacttcagggagcttcatgggtgggtaagagggagggagagaatattcacttagtgccaattgcctggcactatgccatgtgaatgtgatactgatttgacagtgatgccaactcaggctttatttattcctgtgggcaagtgaaacctcagagaagttaagtaacttgcccagggttgctcagaggtgccgagacatgagctgaagtctgtctgactgcgtggtgtaggctcgttctattgtatgatgaaaagaagaggctggtgccaccaaaaaagcttaaggccattgctggagagagtgggtgtggtacgaccacactgggggactgtggcggagtcagctaaaactggccatgtgcttgccagcgttcccacccctgggtatacacccaagagaaaggcgtgcaggtgctcaccaaacatatataccaatgtgtccacagtaacatggaccctaacagctaaaaaactggaagctgcccagatgtccatcaacagtagaatgaattccagtgcactcacacaatggaatactatatagcaataaataaaaggaatggatatttgcaacaacatggattaacctcaaaaatgttatgttggcagggtatgatggctcatgtacccccagcactttgagaggccaaggcaggtggattgcttgagctcaggagttcaagaccagcctgggcaacaaggcgaaaccccgtctccacaaaaaatacagaaattagctgggcatggtggtgcgtgcctatagtctcagctactggggaggctgaggtgggagaaatgcttgaacccagaaggttgagtccgcagtgagctgtgatcatgccactgcactccagcctgagcaacagagcaagattccatctcaaaacagcaacagcaacaacaacaacacaacaaaaaccctcaaaacattatgttgagttaaagaagccggacaaaaggctatgtactatatgatttcttttatgtaacgttcaagaacttgcaaaactaatctactgtgttggaaatgaggggctgggggtggcggctgggcaggagtgggatgggggcacttcctggggtaacggaagtgttccacatcttgatctgggtggcggttgcatgggcatacacgttggtaaaaatgcatcaagttatacatggaagaaagtttcaagagtctgagaatgcctccctccattctcccattccaaaacatggtcatattggcccagctaatttcctccttgcagcagagatgacacatctgagagcagataaagggaggaggggccctcttaggccccactggctgcctggtgataagcagtgacctcaaattaatataggatgtcactgtttaccagctccattgcctgtatccccttatcctctctgcatctgcaaccacgaaagaggggttgggattgttccacagcagaggaaatggaggttctcggaaggacctcggggaggccatgcaaggctactcggcttggagaggacatgacctcgtggggaagggagcaacccggggaggaagccgagggggagcctttggacacacaggcagggacaggcgccagagggggcacctcctgcagtgtgctgcctccacatcaataattgcataatgtggataccatttatgattgacagttccaaaaaccaaactcactcactacagatgagcaaggaagagcaagagccattcagaagtgaggaggtatgacgtacaaggaacacaggatatgtttcatgctgtgatgaagtttcacaatagacttggcatagattgaaacccaaagggctctatcagaagtggcaaatgtggcacgctcaggccaacacccatgccaatgattcctataaaattcccattgcctggtagaagttcacaggagaggaaagttctttcctgcaccaggttctatggagaattggttgcatggtttctcgtgctgtgggcatcagggacttcaggtgaaggtatttagctgtggctttgtgcaaacctcagaactgtgtcctccaagggcctggggtatttggcaggcgctgtctcttgctgcctttgctgctgtatgacaggtgagtaatatgttatatcctatttcttgggagctgcctggagtgtctgcccctcctgcaaacaaatgtaggagtgaagcacctctagtttgagtcaccttaacttactaggtcctgttgggggtgagctcaagggtaactccaaggtgcagagtgagttaggctgctggttcagttcttgagaattgcctgtctaattagtggtctgccaaacttaatggtagagttacagaaggctgtattctttataatgactggctgggctgtttgttgagactccttatttgtgtaggacaatcaagccatcaacacgcaggcagagttgttgctctactaaggtggcagccaggacatctaatcttgtgttatgtatttaatattaaaaaagggggtcgttcactgccctgtttcatactgttcagcttgagactggtaggtacaaaagtcttctcacttcccatgattctagcggtgattgtttaacaccgattttgccagaacgttcaaagcctggatctctctcagagaatgcaaagtgttaggcacattttatttctgcaaactctgtgtttgtgcaatttcaatgcgttggattgggtattccctctccatttcactgtagtcccagctactcccttttgtcttagatctgctaccatcccactcccatacatggggcacatggggttacacagctgtctttcatccccagttcaaggtcatgtggccactttattatgccttgaagctctttcttctcttctatgagctacttgggtgtgctttctgttacttgagccattggttcctcctcttttgctcaaattagtttgggttaggcttctgtcacttctgatcagttcaaactaattaaaattggttccaggactggagttttacatttggtctgtcatttcactgggtctctttctaataccctcaactctcttaccccctgttttgttaaagccaattgacacaattccaatcagcattcagtctacagctacggctgggccaccatcagttgctgctggaaaaaaacagagccacacctgctggccgaagcaaagcaaataacaacactgcctgcagaatctttccagggacttaacatatttaaagcagaaattctgcttcttcctaaatctaatctacccttggtcttccacatttgagtaagtggtaccaccatttggcccagggcaaacacctgggccatcatcaactcctttttctttcatattccacatctgatcatcagatttgcaatcagcaaatcttgttggctctccctacaaaacacatcctgagtctgatgactttgagcctccttcaccgctcctcacatctctgctgtgtatggctgcaacagcctcctaagtggggttcctttttccacgactgtcccttttagcctgtcctctacacagcagcagcatgatcctttcaaaatataaatccagccacgccacttccctggttcttagtaacaaccatcatgctaacgatcaaaggtgatttccaacatcctatgtgatctgtctccctgggtcgcacctcctctccaccctctccttccctttaccctggctgtcctccttaactgaaatgcccccgtaccccagatatttgcaaggctctttgctgctgccttcagatctctactcagatgtcacttctttgggaagacttcctgagcaaaagacttccttgagcaccttgtttccacagcctcccgcactctctgctctctcatcctgcctgtttcttcatagtccttctctttccccgatgtttttggttttgatgtttatgtgtttatttattttccctcaaccccgaatgtaagttctatgttcacttctgcacgtccaatgagtccaaaatagtgcctagcataataggttatcaataaatatttgcagaatgaataagcaagggattgaagaagccaagataaatggtggaaatccggaggacacccctctccaccatcatttgtcaataggcaatttggtctcttgcttcatagacaaaatagaagccacctggaggcaacttcctcacccatcgacaagctcaccagccttcatgcctgtcctttggagcttccctgcagacagtggcaggtaaggcttctgcctctcctaggctgaccctccacctgtgcttcccatgcctcaagtgcagggacgtcgcctcgtcctttccgtcccctatcattctacttcatcctttctacccacatttcactatgctcatgtctttcccatcagccaccttcctcgggaaccaccttcctgggcctctccttcagtcaagctgcacagcagcattttctacacttgctctggcggcatcctcactgtcatgcactagcggttgttggtgaggttcttcaggctgcagatggagacatgggaagggctggactggctccccttctcactgtggctgggcagggtagggggtaccccggcttccaggatctctggaagcaaggacaacctcaagggctgatccacatcctctggtgccatctgccgcccagatggggacacagccctcttgctgcaccgagaaaatgtgtgtcctggattctccgtgagcttttctgaattaaaacaaacaacataaaatcatgggagtgcctttaattactgttgaataagtgaataaaataagattataatattctacagtatcatttatttttcattcttaacattataaagagggcttgttggctgggcgcggtggctcacgcctgtaatcccagccctttgggaggctgaggcgggcagatcacctgaggagttcgaggccagcctaaccaagatggggaaaccctcgtctctactaaaaatacaaaattagccgggcatggtggcgcatgcctgtaatcccagctactcgggaggcagaggcaggagaatcactcgaacccgggaggtggaggttgcagtgagccgagattgtgccattgcactccagcctgggcaaaaagagcgaaactctgcctcaaaaaaaaaaaaaaaaaaaaaaaaaaaaaaaaaaaaaaaaagagggctggtggcccccgagatgagatatttacttttgttcaattgttcattcttttgttcatctatcagacttttaatgatttccttttgtatgccaggctacgtgcttaaaaaaagaaaagcttcactatgctttaagacacaagttcagtaaataaataagaaatgtgtgcttagtttgttccctaaggaaagctggacttacgggttgtatttgtaatagttgtgtgtgtggattaagtaatgtgggtgtgaggaataagtcacaggtgtggatatatcttatgtgtcctgttaaatctggcttcctaatgggaacaaaataaggtcttatttaaaaaattagtaaacatatttattggaagtataattgtgtacaataatacactgatcacgaggctgggtgtggtggttcatgcctgtaatcccagcactttgggaggtggaggcgagtggatcacctgaggtcaggagtttgagaacagactgacccatggtaaaaccccatctctactaaatagaaaaataattagccaggcacggtggcgcatgcctgtaatcccagctacttgggaggctgaggcaggagaatggattgaatccgagaggcagaggttgcggtgagccgaggttgtgccattccgtgtcaaaaataaataataaataaataaaaatacatggatcacgagtgtacagctttataaattttgaacctacctatgtaactggcacccagatcaggaaacagaagtatccctttgttcctcctgccacaggccctctcctcccaagggctaccattatgttgacttctaatgctttagtttaacttgtgcccatttttgtacttcatgtaaacatgacccatttggtttctttatcttacctggtttctttatttggtttctttagcttgtgtctgtgaggtccatccatgttgtttcatgtagcaagcatttgttcacgcttactgcttgatcatattccattgtgtgatatgccatgatttgtgtatcgtttctcctggtgatggacactggaattgtttcaagtttttggctattaaaagcagtgtagctagctgagtgcggtggctcatgcctgtaatcccagcactttgggaggctgaggtgggccgatcacgaggtcaggagttcaagaccagcctggccaatatggtgaaaccctgtctctactaaaaatacagaaattagctgggtgtggtggcatgtgcttgtagtcccagctactcaggaggctgaggcagagtaattgcttgaaccctggaggcggagatcgcagtaagcagagatcacgccactgcactccagtctgcgcgacagagggagactctgtctaaaaaaacaaaaaacaaaacaaaacaaaaaacagtgcagctaccaacattctagtattagtcttctggtgaatatacgtatatgtgtatatatatgtgcatttctttttttttttttcttttcttttttgagatggagtcttgctctgtcgcccaggctggactgcagtggtgcaatcttggctcactgcaacctctgcctcccgggttcaagcaattctcctgccacagcctcccgagcagctgggataatgggtgcccaccaccatgcccagctaatttttgtatttttagtagagactgggtttcaccatgatggccaggctagtctcgaactcctgacctcaagtgatatgcctgcctcggcctctcaaagtgctgggattacaggcgtgagccaccgtgcccggcctatatatgcatttctattggatctatacctaggagaagaacggacgggtcacagagtaggagtggtttagctttgggagttcaaggtataatggctccaagctcccacattccacactagcaggaagtgtagatttctccctggttctcctccaaggctattgacactgagtcattatgcatcttagttctcttctccctgagaaaattcacctgagcctccttctagttaatctcaccacagctggcctctgggggttctgcagccctcatttctatcaaagcatctttggaaggttcttggggccaccacagataccaggcagccagcacaagtctcagttgccaaggctcagtgagcagaggccctgggctattccagggctggctgccaggccctgtccattcccagttgggttaagttgactttccgtcctccagtctggtcctccttgctttttgtctacactgttgtttttccaagtgtggtcccctgaacagcagcatcagcatctcccgggaactcagtagaaatgcagaatatcagactcctcttctgacctgaatcagaatctgcattttaacaaggtctccaggtgatttgtgtgcacatttgggtcgatctgtgctaactataataccgcactcatagtgaggctcagctgtgcctcatgcttttcacacagcaggggttaataatctccttacatccctccctccctcatgccccttgtcatacatttctagagctcacctcccagggagagtttgcccatctttaagttattttgcaggcaggtgttagggcttccccacggcctgtgagtgttccagtgctgcggtggccttccatttcttttgcctgtctagagccttgctcttctaagtgtgttcagtggatcagcagcattggcctcacctgggagccttttagagcatcagaatcccaggctccatcctcagacctgccggatcataaagcagggcaggtgagctcccaaactggggcttagctgccctgcattatgagtttttggctttgcccaggaaagaattcaagggtgagctggtggtgttagacagcgacttttactgaagtggcagtgcacagcagtagcaaaggcacagttccttgtggggcagggctaccccacaggcagtgtgcccagaggagcagctcagaggcagttctgcagtcatttttttttttttttttgagacggaatcttgctctgtcgcccaggctggagtgcaatggcacaatctcggctcactgcaagctccgcctaccgggtcacgccattctcctgcctcagcctcccgagtcgctgggactacaggcgcccaccaccacgcccggctaattttttgtattttcagtagagacggggtttcaacatgttagccaggatggtctcgatctcctgacctcgtgatccgcccgcctcggcctcccaaagtgctgggattacaagcgtgagccaccgcgcccagcctgcagtcatatttatacctacttttaactacatgcaaattaagggggtggattttgcagacatttttaggaaaaaggtgataacttctggatcattgggtggttgccatggaaaggggtggtaactttcaggtgttgccatggcaatggtaaactgacatggcacactgatggacatgtcttacggagggatgcttttgtctcttcctgtttcagctagttctcaatttggtgtggtgtcctagccccacctgtggagtcaagtcccacctcctacctcaatcagaacctgagtttttttccaacacgagctccaggtgagttgattgcacagtaaagtctgagatgtgctgtttacaccactggttcctcatcttggcataaggatcatttggggagatttaagaaaccaacaactcagtgttcctggcttaacttagagttgtggttcctgcccttgactgcacattgaatcacctgggagctttaaaagccatgggtgaccaggcgcagtggctcatgcctgtaatcccagcactttgggaggctgaggtggacaaaccacctgaggtcaggagttcgagactagcctggccaacatggtgaaacccccgtctctactaaaaatgcaaaaattaggccaggcacagtggctcacgcctgtaatcccagcactttgggaggcccaagtgggtggatcttctgaggtttggagttcaagaccagcctggccaacatggtgaaaccccgtctctactaaaaaaaatacaacaaattagctgggcgtggtagtgggagcctgtaatcccagctactcaggagactgagggaggatgatcgcttgaacccgtggggtggaggttgcagtgagccgaggctgcgccattgcactccagcctgggcaacaagcgcgaaactccatctcaaaaaaaagaaaaaaaaattagctgggtgtggtggcgcatgcctgtaatcccagctactcaggaggctgaggcaggagaaccacttgaacccaggaggtggaggttgcagtgagccaagatcgcgccattgcactaccagcttgggcgataagagcaaaaaaaaaaaaaaaaaaaaaaaaagaaaagccatggatgcccagggccacccctagaactggtttgaattggtctttcccctgtgttcttcaatgtaggcagcaactcctgcctctaattccatcaggggccaccttttcctaccataatggctttcatttcacaagtcagggggccaaagagatgagcttgactgttgcgaacgatatctgcctttgctcttcaggcaggaactggggaactaaccctgcaggggttcagatttcttgggctactgcaagacagccttcggtcaaagctccattaacttactagctacatggcccccactgtgatcagtgttttttaatctctgaaaggttttttttcctacctagtgaacaatcacacagatacttttgtagaacgaagatgtttacaaaacaaagcatgtggggcaagtgtacccagccttccttttattcaagaggttctgggacagtgaacttacccagattaatcaatttcacggggtatgccatattttaggaataactttttggacaatttgtccgcacgtctatttccttaaacttgccattttatgtccttgcacagttattatgttacaatatattctccaccatcaaattttcacacttccaggattcaataaaaaagcttagcaatgcctgtgaggcatgaagattaccttctgaatcatcaaagagagatgtttttttctttcttttttttgaaatggagtctcactctgtcacccaagctggagtgcagtggcctatcttggctcactgcaacctccgcctcccgggttcaagtgattctcctgccttagcctctgggagcagctgggattacaggcacgctgcactatgcctggcttttttttttttttttttttttatttttagtagggatagggtttcatcatgttggccaggctggtctggaactcctgacctcaagttgtccacccccctctgcctcccaaagtgatgggattataggtgtgcccagcctgaatcatcatagacagatttgattaggaaccattgctatatcctaaatctctttggtctatgattctttctcatttttacttcaactttttttttttttcccagacaggctgttgctctgtcccccagtctggagtgcagtggtgtgatcatggctcactgcagcctcaatcttctgggctcaagccatcctcccacctcagcctcctgagtagctggggccacaggcatgcaccaccacacctagctaatttttaaaattatttctagagtgaaggtctcactgtgttgcccaggcttccactttgaactcctgggctcaagcagtcctcctgacttggcctcccaaagtgttaggattacaggcatgagacactgcacctggcctttcttcaactttgtatactgaaacatagcatacagagtgcaggacagttctcctggtggccttggaccaacccagctcttccccctttcttgcttgtagttctcaaaataactgtagaatgtgctgggaatgtaacatcctgtgataaggagggattggctgcaactgcctgcgctctgttccagtccttgtcagaaacaggatgtcctgtctgggctcggtggctcacgcctgtaatcccagcactttgggaggctgaggtgggtggatcacctgaggtcaggagttcaagaccaacctggccaacatggtgaaaccccgtctctactaaaatacaaaaaattagcctggtgtgatgttggacgcctgtaatcccagctacttgggaggccaggcagggaaatcgcttgaacctgggaggcggaggttgcagtgatccgagatcgtgccactgcactccagtcttgaccacagaacgagactccgtctcaagaaaaaaaaaaaaaaaagaaacaggatgtccttcaacactttagtccagtgaatcatgtatctccggggtataaagcccaggtgggctgcttcttgggagccctcagctgcagtgcaagtggggcatgcacagttgagactccatctgccccaggctgctttcctgagccttaggtgaccagctcacaatgaaccctaggcttctgttatcccttggtgcctatctgtaagtaatagatcctcttcatgtaacttgttgcatatgtgggtgttttgtctcactggactcagacaagttggtaactaagtgcacagtgaacctgcttcatggagataattactcaaaatataaatgtgtgatgaattatcagagtgaacagctttgtgccatgaggcaggtaaagaaatgagacatggccagcactaccaaagcccctttcatgaaacataagttcctcccactttcaaaaggacttgacttctaacactatcatttttaatttgtttgcctatcacgaactttccatatttggaatctcacagaatgtgttctttgaagcttggcttcttttgtgaagcattatattcatgagatgcattatgtcgttgtgtgaggtagtagctcatgcatttttatatataatacatttttcttatctgatcttttttttaattttaattttaattttttttttttttttttttgagacggagtttcgctcttgttgccaaggctggattgcaacggcctgatcttggcttactgcaacctctgcctcctggtttcacgcgattctcctgcctcagcctcctgagtagctgggaatacaggcacctgccaccatgcccggctaatttttttgtattttgagtagagacagggtttccccatgttggccaggctggtcttgagctcctggcctcaagtgatccgcccgcctcggccttccaaagtgctgggattacaagcatgagccaccatgcccagccttatttgctctttttttgatggacatttggggtgttgttattcttgttgtttttttttgagacggagtttcgctctttctcccaggctgctgtgaatttgcgcgatcttggctcactgcaatctccgcctcctggtttcatgcaattctcctgcctcagcctcccgagtagctgggattataggcacacaccaccatgcccagctaatttttgtatttttagtagagatggggtttcgccatgttggccaggctggtcttgaactcctgatcttaggtgatccacccaccttggcctcccaaagtgctgggattacaggcatgagccaccgcgacatttgggttgtttctagtttgtggctattatgaataaatattgcaatgagcatgcttgtcacatggtgcacatgtgaacacattttgattggtatgtgcctggaggtggaactgatggctcataaagtcacatcaacttcaggtgataatatgaaccagcttcccaaagtggttgtaccaatggacataccctccagcaggtataaaactgtctggactctgttctagtccccttcagaaacaggatgtccttcaatacattagtccagtgagtcatgtggctctgggatgtaaaacttacctgggatataagaattgtgagctggtcatccaaggctcaggaaagctgcctggggcacatggagcaggtatgagacttccagttgttccccatcctttcttggaatgtccttgtctgattttagtatcaaggtttttctggcctcataaaatgaatttggaagtgtttgctctttttttagtctttgtaagagtttgtttaaaattggtgttcctcccgggaggcagaggttgcagtgagctgagatcacgccattgcactccagcctgggtgagaagagcaaaactccgtctcaaataaataaaaataaaaataaaaataaaataaaataaaataaaattggtgttcttgcatccttagatgtgtgtatggcattcacaggtaaagccatttagtcttggaagattttttaagttgcagatttaatttatttattataggattattcatattttcttttctttcttttttttttcctgtttcacaggaaacaacttttggcttcatgatcctctcttttgtaagtatattcttaattttattaacttctgttcttatctttattattttcttttttctactttgtttaggcttaatgtactgttctttttctttctgaggtgggtgcttcttaattttggctttcctcctttctaacatgtgcctttaaagctatgaattttcctttaatcatggccttgacttcctctcataagttttaatgtctgcagaatctgtagtgatgtcctgtttcagtcttgatattggtaatttgggccttctctttccttttgttcaccttactagaggttcattacttttatgattttttttttcaaagaaccagctttttgtttcacttacttttctccagttttcctgttttccatgtcattgatttctactattatctttagtatttcctgccttctgtttgctttgagtttaatttgctcttctattttctagttttgaagcagtgtcgttgtctgggtaaatacctgaggtttgttgtctcacaacaaggaaaattgagtatgtggacacacaggaagtgggtttaggagctgaggtttaataggcaaaagaaagagaaaggagactagaatagcactctctcctgccagagagaggggctcctgagtgggacttccagcctgcagcaaagtgctctggattttataggctggcttgaggaggcgctgtctgatttataggggtcaaagattggttggaccaggtttgacgtctacatagcatgcgaggaagctggcgaccccatcctaatcttctattatgcaaatggagttgttacttggccggtgccatgttgtcttctcctcactgtacacgtggttggcaaagaaaaggaagatggagccgccatgttgaacatgcctagcccccaggtagcccctttcctattggcacagctgccagcatgcactcgtgcacatttttatgtctgcagctcgactttacaggctgttatttgttagaaaagagaatgattgaccgggtgcggtggctcacaactgtaatcccagcactttgggaggccgaggctggtgcatcacctgaggtcaggagttcgagactagcctgaccaacatgacgaaactctgtctgtattaaaaatataaaattagcctggcgtggtggtgggcgcctgtaattccagctacttgggagggtgaggcaggagaatcgcttgaatctgggaggcagaggttgcagtgagccgagatcgcgccattgcactccagcctgggcaacaagagtgaaactccgtttcaagaaaaaaaaggaatgatttgggggctgctttgtattaaaagggaaaccttaccgaggacttccttacctttactatctgctaaattaattcctttttaaactcctatatcagtttcacagatgtgaggtcagattattgatttgggacatttcttcttttctgatgtaagcatttagtgtcctaaatttccctctcaccactgtttaagctgcatcccacaaatttagatgtgttttcattttcactcagttgaataaatgttttgatttctcttgagacttctctgcgactcaaggattatttagaagtgtgttttttagtttcctagtttttggagattttctcgtgacctttctgattgatttctagttcgattccacaggggttggggaacacacttggcatgatttcaattcctttaaattcgttcaggtttgttttatggcccaggatatggtatatgattatgaaaggaaaataaaaactcgggaccccaattcaccaggccaaaagaaaaaaattaagctgagagccgaatcacgcaagaagctgcctttcattttgttcctaagcagacagctacagataacaggttaaattatctccaaaggtagctactccgtgttccccttaccttaacgatttgctgagcctgagacgaatacgtcttgactctttctctacttgctccttttctcttgcaacatgtggaggactgttcctctccagcccacttttcccctttaaatactgatgcccttaaattcatctttagagaaaggcacagaccacagactgtttctgtgattctgagtttacttcttctgggcatgtccttaaccttggcaaaataaacttctaaattgatcgatgcctgcctcagcaactttttggtttacgtgatcttggtacacaagccacaggtgcttgaaaagaataatatgtcttctgtttttgctgggtggagtgttttatagatgttgattagatactgttgactgatgatggtgttgaattcttctatatccttgctgattttcagtttagttctatcagttgttgagagaatagtgttgaagtctccagctctaactgtgtatttgtttatttttgtctttcggttctgtttcttatattaataaactttatttttaaaacagttttaaacttaaagaagcaagaagatagtctcccatccccccaatttcccttattatgcacattttacattagtataatacatttgtcataattaatgaaccaatactgataccttattattaactaaactccatcatttatgcagctttcctcatattttccctaatgtcctttttctcttctagaataccacattatatttagttgtcttgtctccttaggttctgtggtataataggaaatatacacagtattttgtctttgtccctggttcctgtcacagagctcctaaaacgcttgggatttcctgaatgattgcagtgtcctgtgttattcatcataagccccttttgatcatacctgagttaatgctaatgaggtgacttagggttggtcccctagataacctcagaatggggacagtcaccagaaaggccaagtaattagagcattagagggttggaatttttatccccccccacgaatttttgggaagcagggtggctagagattaagctctattacaactcttgggttgggcatggtggcttgcgtctgtaatcccagcactttggcaggctcaggttagaggactgcttgaatccaagagtttgaggccagcctgggcaatataacaagacccccatgtttataaaaaattagctgggcatagtggtatgtgcctgtagtccctgctacccaggaggctgaagctgaggtgggaggatcactgagcctgggaggtcgaggatgcagtgagccatgttggtgccattatactccaacctgggtgacggagttagaccatggtctcaaaacaaaaaccaaaaaaccccctcttgaacaacaagctctcatgagcttctgggttgctgaacatgtggaggtgctgggagagtggcacacccagaggaggcgtggaagctccgcgtccacccacaccttgccctgtccatccatctctttatctggctgttcatctgtatcctttataataaactgataaacttaagtaaagtgtttccctgagtcctgtgtgccattttaagaaattattgaggctaggtgcggtggctcacacctgtaatcccagcactttgggaggctgaggcgggcggatcacctgaggtcaggagtttaagaccagcctggtcaacatggtgaaaccctgtctctactaaaaatacaaaaattagctgggtgtggtggcacatgcctgtagtctcagctactctgaaggctgagtcaggagaatcgcttgaacctgggaggcagaggttgcagtgagccgagatggcaccactgcattcttgcctgggcgacagagcgagattccatctcaaaaaaaaaaaaaaaaaaaaaagtattgaacctgaggcatgaggttgtgggaaccctgatttatagccagtcagtcagaaacatgggtctcagcctgggacttgcaattggcgtctgaagtggaggcatcttgcgggactgagcccttgacctgtaggatctgacaccatctcaggtaggtagtgccagagtggaactgaattacagacaccagttggtgtctgctgaagaattgcttgatgtggagggaagcccaccatatctgatcacagaagtgttgaatgtgagtagagagaaaaaacaaactgtttttgtttttcttggctatgacctttttaaggctttccttgtttttgatgaccttgaaatttttaaggagtagtagtcaggtatactataggatctccctctactggatttttttctgatttttttttttttttttttttgagacggagtttcactcttcttgcccaggctggagtgcaatggcacgatctcggctcattgcaacctccgcctcccaggttcaaacaattctcctgcttcagcctcccaaatagctgagattacaggcatgcgccaccatgcctggataattttgtatttttagtagagatgaggtttcaccacgttggccaggctggtcttgaactcttgacctcaggtgatccactcaccttggcctcccaaagtgctggcattacaggtgtgagccactgtgccccaccttttctgtgtttttctcataattagacttgggtaatgaggttttttggaaggaaggtcacagaggtaaagtgccattttcatcttatatcaaggatgcatactattgatgtgattcatgactgttgatgttgaacttgatcaactggctaaagtagtgtttatcaggtttctcccctgtaaagttattcttttttccttcctttccatactatactcagtggatacttatatgaagtatggtcacacaacgaacctctgcctcccaggttcaagcgattctcctgcttcagcctcccaagcagctgggattacaagtgtgtgccgccacacctggctaatttttgtatttttagtggagataaggtttggccatgtaggccaggctggtctcaaactgctgacctcaagtgatccgcctgcctcgtcctctgaaagtgctgggattataggcgtgagccaccatgcccagccttaaagtttctgtttttcccccaaggaatgtttttaagcctatttgtgtcagtaaatattaattttaaaaaacttgcattttccagcaattatactattgtctttcatttaataaacattttttgtaaccctattatagatgtaaactcctcagggatgtaagacacaacctaaaatcagtgtgagccacctaagacgcatggtgacactctcaaattaccttgggaagaggtttacctatttacatgcccaccgctagggtatgagagcaccggcatctgtacaactttgccattcctcagtgtaataaaaaaccgttgtttttttggccgggtgctgtggctcacacctgaaatcccagcacttcgggaggccaaggcgggcggatcacgaggtcaggagttcgagaccagcctggccaacatggtgaaacaccgtcactactagaaatacgacaaaatagctgggtgtggtggcgtgcacctgtagtcccagctacttgggagactgaggcaggagaatcgcttgaacccaggaggcggaggttgcagtgagccgagatcgtgcctctgcactccagcctgggtgacagaacgagactccatgtcaaaaaaaaaaaaaaaaaagagattcagagactcagaaatgtgatgtccagactgcctgccagaagtgtatccaccctcagaatatgaatcctgccctcccagttataccttgcttatctacatggggaagttatcccagatattatatcaactgtccctgcctgtggtccaccttaatttaggaacccttgctggctgaaaggaggccaacactcatcagttgtagagtccaggtcccttaggatattcctgggctggtcatgagttgcaccctggggtctcctggttggtggctagagaagggtagaaggaaattttgccagaagagccagtcctcttgtgatgcactggaaaatttttggcaaatattcagtcactttcctctccttggagcagagtatatttccctgccccattggctttgggcttggccatatgacttgctttggccagtgaaatgtggatagatgatgtgttaggaacagaagctctaaagcttcacgtatttgtcattaatcatgggaagaatatgccccagacagcggatggttcaaggagaatacagagaaaaggggaatggatttgagccataaaagcctagaaccaacactagaatctgcagacagagacctaagcaagaaaaataaatgcttgctattgtaacctgtgaattaaggggtggcttgttttgtagcattactgtggctatagctgactaatacacctttctttaggggagtcatccaggccaagagggagctttctgggcactggtgatgatatgtgccgtggatccacagaatgggaagctacccttactgcgactcaggtccagcaaaggggcctggcaggaataggtcaagggcttcagggccctggggaggatgcatttcatggcttgattccagcccaaggggctgtagggaatagaagccagtgggcattcttttagttctaatctatgagattgaggaaagatcttctgttcccactgcccaattcttggctgatgaggaagaattttattctaaatattcagagctagctgggagcggtagcacgcacctgtagtcccagctactcaggaggctgaagcaagaggatggcttgaacccaggagtccagcctggcaacatagtgagacactgtctctaaaaaaatagatacataaaaaaattaaaaataattcagagctgctggctacttctcttccatcagatgaagacctgaaaaactgtggtgtcttaccctgctctcaagatcccttctgattcccaacccacaaactggtacagtccagtgggcatgaagtgttcactggatgtagaaagttcctgaaaggggctgggtttggtggctcacacctgctatcccagcaccttgggaggctgagatgagaggatcacttgaggccaggagttcaagaccagcctgggaaacatagtgaggccctgtctctacaaaaatttaaaaatgagcagggcatggtggcatgcacctgtagtcccagctactggggagcctgaggtgagagaatcgcttgagcccaggagttcaaggctgctgtgagctatgatcacaccactgcactctagcttgggcaacagagcaagaccctatctcccacaaacaaataaacaacaaaaaagaaagttcctgaaggggatcaggagaatggaggatcacgactgtgtcctcagctactcagaaagcaatgtgtgggcagcaggacagtggctggaggtttgatgattggatggactcttcttggagttaagggtggggtatatgcattggagagggctgagccttttccttccccacctctggccaggggtgcctttgatgcacagggtaacactctggcaagagctctgagtcttttaattcagctttgttaactctggagtcccaactgtttgcagatggctggctgatatcctcatttttaaagacctgctttgaatttttatcctcttttcagctcttcattggtattttaaggggagaggtcttataaaggacttcaataccaagttgagttggtcgtgtctgtgtttgattaaaaaaaaattggctgggtgcagtgcctcacgcctgtaatcccagtactttgggaggcctaggcaggtggatcacctgagtttgggagtttgagaccagcctgaccaacatgtagaaaccccgtttctactaaaaatacaaaaaaattagctgagcgtggtggcaggcacttgtaatcccagctacctgggagcctgaggcaggggaatcgcttgaacccaggaggcggaggttgtggcgagatcatgccattgcactccagcctgggtaacaagagcgaaactccgtctcagaaaaaaaaaaaaaaaaaaaagaaatgtcctgagggctcctaataaggcaggcagttctagagggtagcttgggaaggggatgctaagtatgggttgagtgcgtgggaatgctagcgtagctccaaaatcttcatctccagaatctctccacctgttctcttcactcccacccccattcctctggcaaagccgccatcatctcttgcgtggactgttgcagttgccacagtaaatggcatccttgctaatttttgacactgccagttatcctcttatggcaggacttttgcacttgctgtctcctctgccttggatgctctcctcagggatctgtgtggctcactcccttaccgtcttcacacatcacctagctgagaacttccctgagtgttgggtctaaaagtgcaatttccccatccccaacatttcctgttatatttcttttgcttatcaccatctcacctgccatatatgttgtttattacctatcaccctgttctagaacaagaactccatggtggcaggtttcttttcttttacacactgctgtatccccatctactgcgcagatagtaggtgttcagtaaatactaccaaatgcatgcatttgatgacctcacctggccatttgttgatggttggagagtactggctggttgaagggtgtcagagggcccctatgccccacgtgtgaaggtgcagttcatagctggagtcagggggacaccgactacctaacctgtatgaagcccatgtggtaggcattgtaggcttgtccactagggtgactgtaagatgccccttaagagcttggaaagaaaagttcttaagattgtcttctgagagttctactctgaaatggacccgcaatggaggagattagagacaagcaatgtgaacttaaaggcacagagcaaaattaaaggctgtgaatgaagcatgagtcagatgggaggatggagaggggatgtattggaaacagaggcaggaggcaccaggaggtggaaccctggcccagggatcaagtcctgtgcttggtacactaaataaataactgttcactaactcctcagctttgcctgtgagctcatgaagcagctttcagaccatggactgacttcccatcaagctcatttattgtcataaatacattggcttgttgatggttaagttatatatcccactaaaaattagcatattggccttgggcttacaaactttacttcctagtgagttaggaagtccatatcagcttatatgagactggtcaccagatccgctttctggacctgtaatactgaagaatagataaatgactggctgggggcaagttcactgagcaaataatactgcagtcttctgggatgcggctagccagggatttcctggtgtccccctttccttttcacagctgtctttctttctttttctttctttctttttttttttttttttttgagactgagtctcgctctgttgcccaagctggagtgcagtgccacgatctctgctcactgcaacctccacctcctgggttcaagcgattctcctgtctcgccctcctgagtagctgggactataggcgcatgccaccacacctggctgattttttttatttttagtagagacgaggtttcaccatgttagccaggatgctcttgatctcttgaccttgtgatccacccgcctcggcctcccaaagtgctgggattacaggcgtgagccactgcgcctggctagctgtctttcaaaatcctaaacatttggccagggctgtggctcatgcctgtaatctcagcactttgggaggacgaggcaggtggatcacctgaggtcaggagtttgagaccagcctggccaacatggcgaaaccctgtctctattaaaaatacaaaattagccaggtatggtggcatgtgcctataggcccagctacctgggaggctgaggcaggagaatttcttgaaccctagagggggaggttgcagtgagccgagattgggccactgcacttcagtctgggagagcgagactccgtctcaaaaaaagaaaacaaaaaccaaaacccaaaaacctaaacatctggtcaatctgggaagatatccttgaagaagatggcttctgagataacttgtttttgctaggttcttggtgagagggggacttcttagcttatgttgcttgcaaattagataactggatacaggcttgaaatgtgttgacggaatgtgtagcagacaccaggaatgcccacctgaaatctattctctgtttcttcttgctgccagaatcctgattttggcaatgatcctcaatcatcctaaagcgagggttgacaaactttttctgtgaagggcaagagagtaaaatttaggctttgtgagccaagaggcaaatttgagaatattatgtagtaatgttcatacaattttagtgtgtcatgaaatattattcttttgactttcccctccaatcatttaaaaatgtaaaattcaggccaggcgcagtggcttatgcctgtaatcccagcgctttgggaggctgaggcaggtggatcacttgaggtcaggagttcgagaccagcctggccaacatggtgaaaccccatctctactaaaaatacaaaactagccgggcgcagtggttcaagcctgtaatcccagcactttgggaggccgaggagggcagatcacaaggtcaggagatcgagaccatcctggctaacagggtgaaaccccatctctactaaaaatacaaaaaattagccaggcttggtggcaggcgcctgtagtcccagctacttgggacgccgctgaggcaggagaatggcgtgaaaccaagaggcggagcttgcagtgagccaagattgcaccactgcactccagcctgggcgacagagcgagactccgtctcagaaaaaaaaaaaaaaaaagaaaaaattagccaggcgtggtggttcatgcctgtaatcccagctacttggaaggctgaaggctgaggcaagagaatcacttgaatccgggaggcaaaggttgcagtgagctgagatggcgccactgcactccagcctgggcaacagagcgagactctgtctcaaaaaaaaaaaaaaaaaaaaaaaaaagagcgagcttgggttcttgactggcaataccagcaaccacctgttctataacttgccaagtgagaaaaataatgccccaggtttatgcagctattgatccacttccttattgcctgcagctgtgctcttagctgatccggtgtgctagggatgtcatcattatctgccccgcccccaccctcagatgctggtgcccagatggctgtgttttgccccacatgatccatctcgctcactcccatgtgcccgccctcactgttcagacctgacccaaagttagccaatccataagctggcctttgtggcttggctcagtgcatgaatgggaacaagctgattccctctctcaggaaaaggaactgagattcctttttcgggttctggcaggacagaaggaggtggaccaaaacaatatggtggagtcacgtgagtggtgaatcctggaagaaacatccacagatgtcgtggctgaggtgtctgcaaatgcttctgatgcatccttacctccgactcctggctctgaaatctcagcctgttgtggccctagctcctggatttcttcttgattccaagcatatcttgcaagttccacttattcctccccagaccacagcaattttagaatgtaggccggcatcctgctcagcattccctttgtttcactgcttcccaaaagggctggggattggggaagggaagaaagtcctggccagacccttgacagcagtgcaatgcccccctgcccaaaggccccggcaccacttgggccgagggagcacgggtccactgggctcccgaaagccattctgagcagagaggctgcgggaccagtttatcctttacaagcatctggttttatgctttcctgaagccacaaaaaaaaaaaaaaaaaaaaaaggaaagtttttccaagtggacggtgaacatgcaacccctgggggtgtagtaggatgggaatagaaacagggtgaggggtgctctgaggagttaaagctctgacaggtcactgagggagggtgactgaggtcccaaaactttctccaggacctgttggcacccgttggaggagggattaaggggctggcttgcagcatgacagtcaggagcctttgggggcagggtggggctccagatgggagggttaggtgacctggagggcgccatggagggcgcagctggttccttgcagcctctagcccccagaggactggtgggaccagcgggggtgagggccttgcaaggttggtgatggtgagccagctgccagacggcagcagggctgtgtcccagagaagggtcagtgggccaactcccaagatccagtatttagtaaacacttaagcccagccccaagcagccctggggacagagccctctcccctgtggtggatgcaggtgcagattctatcgtaacccaggatgactgggtgtgagctatgagggaggctgcaaaaagtgcagggcttggcaaaggatctgtgtatggcaggaggaagatgaagactctggaagacagggagtggagagggccagcagggtcaggggcgtcatcatgcccaaagagagtagaggagataggagatactgcagtaggcgagtggccttggggcttgtatttggggtgtgaacactaacatctggaagggtgaacactaacatctggagctagagacagcctcttgggagtcatttctgtacaagtggtcattgagatgacatggagtggataaaactgtgtgaagagttgagaaaaagaggaataaaaccctagggagcatttaagagtggagagagaaggctgtggaggaggcagagagagagtagggtcagcaggtcagaagagatcccagaggcgcggctcagaggcagggagggaacattccaggaatcagggagtggccaccagtgtggactggagcagagaaggcggggaggagaccagggaaatggaaggtcccaggtgacttgcaaaagcagccctggggatgctggggacagaggtcccgggaagagtgtgggaagaaagcaaggtgggcagtgagagcccagctggagagggagggcagactggagatggggtccttgagtgggaagcaggaatgaagctctttaaggatggggagtgggcacttgggtgaatgctagtgtcctcggaggcttgcttctgtccctgtcacatctcacaggaccatccctttctcattcacaaactccctcaggcctcaccccatcccttgaggatcatgtaaagaaattcctactcgctggagacaatggccccattttttttttttttttttacatgcatctcagggacagtctctctaatcagatgtgtgggctgggctggggatctgagcacctgaggacccaggaaatggtacagtgaatgcacttctttcagatggtctccaaatcactagcaagaggctgcctcctccagaaggtctgttgctgttttctcccatcctcttggccattctatgaccctttgccatgtcccagaaccaaggtcagcagcacagtgctttactgatgattagaacaaggtacctggatgcccttgctgtggcatgatctatctaggggctctgaagccctcctgcacctcctgtaggctcacaacctggtgcagggataccggaggaggaggtagctgtgtgcagggggcccctgtgtcccagagacaggctgaggctcaaacatcagacatattttccagattgattaccatgcctagagcaagtatagggcaagccactggccttcctgcctccactcccactgggttaaccggggcagggaggcccacaaatcctcctgatgaaggctcccttcccaccctccccttttgtccccactgttgactttctgtgggatcagctgccctggcatgtgggactgtcagaggtactggaaccagagtgactccatcttaaataggggctgggtaaaatgaggctgagacctactgggctgcattcccaggagatcaggcattcttagtcacaggatgagacaggaggtcgacacaaaatacaagccataaagaccttgctgataaaacaggttgcaggaaagaatccgaccaaaacttaccaaaaccacgatggggaagaaagtgacctctgattgtcctcactgctcattacatgctaattataaggtattagccggttaaaatacactcccaccagcaccatgacagtttataaatgccatggcaacccaaggaagttaccctatacggtctataaaggggaggaaccatcagttctgggaattacccacctctttcctggaaaactcatgaatagtccaccacttgtttagcatataatcaagaagtaaaaataagtatgagcagctgagcagcccatgcttctgctctgcctatggagtagccacttttattcctttacttttttttttttttttttttgagatggagttgcccaggctggagtgcaatggcatgatcttggctcactgcaacctctgcctcccgggttcaagcgattcttctgcctcagcctcctgagtagctgggatcacaggcacctgccaccacacccggctaattttttatatttttagtagagatggggtttcaccacgttggctaggctggtctcgaactcctgacctcaggtgattcacccgcctcggcctctcaaagtgctgggattacaggtatgagccactgtgcccagcctattcctttactttcgtaataaacttgccttcactttactgtatggacttgccctgaattctttcttgcgcaagacccaagaaccctctcttggggtctcgatagggaccccttttctggtaacaggaacaactttcactctgcttagagaccctctgcaaacccaaggctgctgttgaaacaggtcctgtcccagacgccaatgttcaattctttgacactgcggtctgcccccttactgaccactgatttgacagatggcccctacctctgccagaagacagtgagggctgtccgctggtgtccccagctttggggcagccaatgtgctgcaaagtggagccctctttggagtatgcaacattctgtcagcacccaacatactcccacccataaactttccttcctgtgcctccagggaggccaggcctgaaagcccagaacctgctgtagactcaccgtgtgaaatgtctgctccaagccctgatactggctgcctttttaactctgtaaaacttgggtgagatgcctgaaattgtgggtgaccttttagatagactacctgcctagtaaagaatggaaactttgggctcaaaatactggtctatgtggccccagcagctgggtcatccagttcagagcacccccagacaccccagtgtattgtctaacccactgtcctcccaagggtccactggaccgcagacatcacccccatgctggttggaagtatgtggttgatactatccagctgaagactgaaatgcttgcaatctcatgggaatatgacaagtaggaatatgacattttactcaaagctaacaagcatggttcctaggtatgggttcttttcctagccatgtacagctatctactcgggcttgtatatcttttcatgtaaacttatgtttcacccatttacctgatggccgccttcctcactgaggccctcagagcattacataagcatctggggagactgacaaagggacaatttgtgcttaggatcactatttggttcacaagaccgatcatgtgagttttaaaacctaacaacccccccccaggtcctttggtcatgctaaaactcccaacagacagcagccatcagttaaagagtcagttaagttgaaactagaaaggcaaatgtagacccaatctattctgttgcgggcctttagttcttgacagactttaggggaaaaagtattttttttttaatgggttatgggctaaagagggacagtttgcacagcttggacaaaatagaagtactcttaccaataaatatgtctcaaaatgacaaataaagctctccaattggtggcttggaatcccagcaagaagtgatgggcacaggcacgatgagctatgtacagagtgtaaacagtaaggcccttgaggggaagtaataaggggtaggggccaggtgatggggtgtgcacggaggagcctgggtggcggacagcgggcccatggataaatacagcaggcttgtatgacggctatacaatctgccaccaaagcttgtgggtggtggtaggtccactgggttcctccagttggcagtaagaaggagaaatttgtccactgaggagccctggtcccactgactttttccctaagggaggcactggggtagccggccaaagcttctgtgcctatttcccagaagaggaggggcaggccttcctggccatgcttggggctgtctactcagggttcagggcatggaggatggggcagtgtttctcaaatagggattgggagcaaaaggccccacggagcccgcagcctctcccttctaagaaaagagttctgggcacctgagtccagcagggggccccactacttttcacctttcaagggctccagcctcaagctctgcccagttcctcagggatgtcacagagcagctgccctgatcagtttccgggtctccgatttgcacgggggctcttagaacaccagcccgcctctctggtcccccttacccccaagcccagcacactccgcggcctagctctggggtccttaaatatcggtctcccgtaggttgctgtagtcggccaattcgtaggcctggcaggtggcgccctcggccacctcgtgtgggacgcctagggacacagcctccacctctgagcgctgggcgcacgctgcctctgcgcgctgcgcgcccccggcgcggatcttgtgcgacaggctggagactttggcgcgcagctgggtcgtgggtctccggaacggccccagcagcctccactcgcggaaggcgctgggtggctttcgacggctggcgaccggagcctgcatctcgggcgtgcctgggggttcggggtcggggtcggggagcgcggtgagggccagcggcgctccggggggcgcgtcgcccgaactcggggcgcagtcctggcgcaggccgctggtggaggcccgccagtggtggccgtagacacgccagagagggcggcggcgccggcgacgacggcactggcagcgcaggagacggaggaaggcgcgcttgaactcgcggctggaacaggggtagatgagcgggttcacgcagctgttgaagtagccgagccagaagatgaccttgaagacgccctccgatggcttcagctgcgggaacaaggagcctgtagggagcagagaccgatactatttagctgcttggggagggggaggccaggcggctctgggcgcaaaggggagacccttcagtagccttggctgagtcattgactaggagttctcaagggatccgtgctgtaaatcaggaggtccatgaacttggatagagaaaaataataattgttttcactcacctctacctgatattgaggattaccttcaatgaatgtaggcaacaaaccagagtagagttagacaaaaccacgtgcaattgctgtttttgtagctcaaaaccggtgcaatattggcagtttcgtattatgagacaaagtagcaaacatagccatgtttgctcatttctgcgtgccagcataatttcacaaagtccccgactctgtgacaaagtacggctctctggaaagatgctttgaagataaaataggatagaacatacgcccccgcctccctgccacatctcctgtctgagtcactgttttcctgaaatgataaatgaccctagtccttgcctcttcctacacagaagataacgtctgaccaggctagtaattatgctgctatgaacagatatactcttacacccaaaactcaatataattctgctttaatagaattgctgagcaagttcaataaaattttgtacatatggaacccgcgctacctatatataaacagtagattaaactactgtgctggagcagtctaatataacctctctgaagggctgggctacagggcttagtctatagtcctcaataagacttctaaataaaactaatgttaattttttaaaagcttttttttctttaattgataatatgattcaaacgaacattagccgtccccacggatattttcctatcactttcagttgttgcagatgttttgaaatattctctatgctcctcacttttgggaaatgacagtcattagaatgcaccactagatcttgtttttttttttttagacccacagagtcaatttatttttgataaaggtacaaagataattcaatagagaaagggtagtcttttcatttgtcttttcagcaaatggtcctagaacaattgaactagatcttgttatgtaataccttaatgcagaagcatattcattagcaagtcacgcatttcctgtaaaaatattttgatggcttttccaataaaatcagtttcatttgtaatcttttgtattttgttttatgcttttgaaagcgtgactctgagaagggacccatacgcttccccaggtgcctaaggagtctgtaacaaaaaggggtaaggaccctcgaattaaatgttggccaaggtttgctccctgccaggtgctgtgctgggctcacacacacgaggaggcattacacatggcccttatttcccagctagaatgtgaataaatatctttgagatgcaggtggggtgatgatggtggtgctcagtgtagacagtccctgactttgatggttcgacttaattttttgactttacaatggtgcaaaagtgatacgcgttcagtagaaaccatacttcaagtacccaaagaaccatcctgtttttcactttcaatatagtagttaataaattacatgagatatgcaacactttattataaaataggccttgtgctagatgattttacccaactgtaggtgaatgtaagtgttctgagcatgtttaaggtagaccagggtaagctatgatgttcagtaggttatatgtattaaatgcattttgacctatgatattttcaatttacaacaggtttaacaggacataattcccactgtagctccccactgcagctgtgtgtgcatgtagggtggcagccacaggctcagagacagcttaggggggtcagccaggatgaggcagggcagagggtattacaggtgggaaggacaggcgggcaagaaaataccaagtttgggtcctgggaatatcctataggataaactcagaaaatctcttttgggacaaatagtgaaggggcttacatgctgtgaagttcagcttttattttgtggatgcttaggggccgcgaatatttttaagcaggtgagagatagagcctggaattaagcctccataaacacactgctcatgggctgttgaaatgcagggcaatggggctgttccagtggaagtggtcaggaaaggcttctgggatggctttgaaaaaggagagtgccagggaggatggggcaggggcactaggatctgagctgtgccaggaagaccctcctttccacaaacatctcccctgacatccataccatggacccagaaaaggtcatttttccagaaaggcacatgaccaaatgcaaaggcacaatccaggcagcagaggccactctttcaacctcactcaccctcagcagcagtaggggcaagaaagcagggggccaggggtgttccatcctggatagaggctgcaggtgcctgtgagaccaagcgggccaggggtgttccatcctggatagaggctgcaggtgcctgtgagaccaagcgggccaggggtgttccatcctggatagaggctgcaggtgcctgtgagaccaagcaggccaggggtaggggggggtccttaacaaattatgggaccttctctctcttcctcttgccttcaaaaaaaaaagagcagggatccctactgaggaggcagaggcaccattcccctctctttgacctggggaatatcggctttgcttatcacccctcctcccaccatacagagacagtttctggtgctaagagacaccgcaggggaagaggagggtcccatagcatcatatggcacaggcttctcaaaccttggtcatgtggccctaagcaggttatgtggccatctaagtttttttttttttttttttttttaaatagatggagtctcgctctgtcacccaggctggagtgcaatggtgcgatctcggctcactgcaacctcttcctcctgggttcaagcaattctcctgcctcagcctcctgagtagctgggactacaggcacgcaccaccatgcccagctaatttttgtatttttagtagagacggggtttcaccatgttgatcaggctggtctcaactcctgacctcgtgatctgcctgcctcagcctcccaaagtgctgggattacaagcgtgagctaccgtgcctggcccatctaagtcttactttccttttaatattatttttctagaaggaattttgtgaagattcatatattttaggtcccagcacttagcaggctcttaaaaagtattggtagctattacttttttttttctttcttttttttttttttttgagacagggtttctctcccatcacccaggctggacttcagtggcacgctcttggctcactacaacctccacctcctgggctcaagtgatccccttgcctcctgagtagctgggactacaggggtgcaccatcatattcggctactttttgtatttgtagtagtgtcttgccatgttggccaggctggtcttgaactactgacctcaagtgatccgcctgcctcagcctcccaaagtgctgggattacaggtgtgagccaccgtgcctggtttattagtatctattacttacctccatttctgtggcttttgagtgaagagaactcacatctgggaagggacccagtttctagctctggagagtggccagaaacagcagctgagacctagtgggttttaggggccactggcgcattagtcaggatgtgtgaaagagattattttccccgggagagaggttgggccatccctggaatgtgggggccactagtgttgacctcagcctccaggaaagtggccctcaagaacagcatcgctcaatggccgcgaactaagacagagtgctgaaaatagccttctgactcaagctacaattcttttatatttagcccaggatgacaaatcagtggactatgcttttcagtggtgagcctgaagctggccaaagggcattgttattgcatggtttttattcagactggtgggcaacatggcatattgtagtatggccaggtcatgttgtaaacattaatatggtaatttatgctcaaccaacctgaagtctgctgtgagctgggaagtccttacacgagaaggagctgtaatacaaactcagcctttcagccccaaggttttcccactgtatcctgttgaggttttgtcttactttgggctctcccagagcagactgacaagagtagaaatacaagtttttaatttgggaggtaaatgaaacagcttgagtgagtgggaagaagaatcagggaaaagaaggaagccaataaagtgtgttatcaagttacggatcactgtgggcaatgggggagctctggatggctatgaagagcacaaacctcagtgttctcacaccagtagagtgagggaggtggggtatttatacgcccattcccatcagtcattgtttgggctgctccctctgggtgttaattttccacacttcctttctgccacatgagtgtgcagagaaagtccctgggcaaagaaatgcaggcaagtgctctaacagaatttggccctcatgcactaaagctctgggggagatgggtggggaaccagtggcatctgccacaactttgttttatgtgttctctgcccactgcatgcagacatgttgcctggaaatacaaacaatctgtgcattgggctccagattccgcaggcagcggctctcaagagacttctcctgttccgctcacagatgccggtttgaatttcacacctgcctctgcccacagtgctccaatccaccacctacaccgccctgcacttgcccactctcttgactgcacccctcagcattctctcatgggcccacagcctcatgcagggatctctggaagtcagaaagacaactgggcattttcctctccgtggcataccatgagtgtgaaatggggaactgccccaagacccctgagcatgggcacttggctcacaggccttgttcttttgtggctccaatgtctctctgcagtcctctgtcttcatgtgcaacagccaagtggccaggctgactcactttgcactctggccacaaggggctccccagtcttgcctctgggctcttgcacatgattatcctggaatgcccttcctctatatctggtagtgctagctccagtggcatctccttctgaagtctctcttacaccactcgctcctgacccagctgagctattttactctcctcccacccgcagcacatcactctcccttttaagtgcctaaagcactataggtaacgatcagtttcctgtctatttcacctttaaaggctaagctcttcctaccacttggcatctagtaggtacctgatacattcttggactcttttctgtgtatcgcaccttgcagctcatccatcaccaactcctgttggcccctaagtcccctcgactttctttgtatcaccttcatgttactaccttggtccaggctaccatcgttgtctacctgcagtgcctttctttccttccttccctccttccttccttccttccctctctccctccctccctccctccttccttccttccttccttccttccttccttccttccttccttcttctctctctctctttcttctctttctttctttttttttgacatgggggtttcaccatgttggccaggctggtcttgaactcctgacctcaggtgatccgcctgccttggcctcccaaagtgctgggattacaggcgtgagccactgctcctggcccctgcagtgcctttctaagcggccttcctgctcctgccttgtgcccgcccccggctccgaagcttgctctctgtacacagctggggatccttttaaaatataagcctgagcatttcatttcttcacttaaaatccattagccactgagtgcaacttcctgtcttttctctctcttccttatctgtactttgacctcctgccagctccttggattcctccttctctgcttagctgagactcctactcaccagcaccttaactgttctcttttccaccaaccccctcatccttctggatgtagggagactcatccagccagatcctgactctggagcaatttagtcgctccttgaacacgcttggggtctttgacctcagctctatgtcccatatttccagtgatctaggctcctgtcctctgccagctctctcccttttcctttaccggctctttactgcatcgcaggtagacaatgatggaagtgttgatcaaggtggcattaaggaggtagtgcaaagttggggggatttggcagcctaaaggagttggtaatggatgaggtgcaaggtgtgatacaaagagtccaagaatgtatgaggcacctactacgtgccaagcacggtgtgaggagtttagccttaaatggtgaaatagagagggaacatatagttacctacagtgtaacctttcctataccaaatctttacccctctttccaagccttgcagcctgccccttcttctccagagcagttgatcttacctcctgtttcacagggaaagcagaggccacagaaactaggcactcgcccagccttctgcacctctcatcttctttggtaaggaagggatcgctcctcctacccaaggttagtgtccctacttgtatggtggagccctcgatccttaagccacccacaagcctgccttggttacagctgctgcccctttgctggctccctggccaccaccttcttctctccacgtctccagccctcacctacagtctccttgtccccacctgacctcactctgctctgctgctttgccccacatgttccacccctcccaggccctcaacctgtagacactgccctcatcctcctgggtgccactcatctcatctgtggcttcccggatgacagtctcttggtttttcctactccttgtcagtttccttgctgctccttcctcacatcctcactgctaaatgtaggagcgcctcatttagtcttgcagtttcctgtctttgcattctcctatcagtgtcatctaggctcatggtgttaaatattgactttacagctcagacctctctccttaattccagactcatagatccagctgcctcctagacatctccacttgggagtctagtggatctcacacttatcctgtcctcatgaagcttacatttcactggggaagacaggaaataaacaggataaacaaggaaaatgtaaaggtatcaaagagtaaaggtatactaaggagaaaaaaatgaagcaggaaggaagatgggggcgagtgtgcttgtgatatgtggctaggggtggtggtataaattctggataaggtggccaggaaagtcctgatgagaatgtgacatttgagtaaagagctgaatgaagtgagtgaatgaggtgtgtggagatctggggaggaacattccagcagaggaaacggcaagtgcaaaggccctgaggtggctccggtatgtttgtagaacgatgacgaggttggtgtggacagaatgcagtgattgagggcagagaggaaggagacgaggttggaactcaaccacccaccctcaatgcgccctcccaccctgtctgagacaccatcatcacttgccttgatgaatccagcagccccctcactgcttgtgcccctgccccctgaatcttttctcaccctggcagctagaaagactgaaaagactggtcacgtcactcctctgctcagaaccctccaacagctcctctgcctcctcctagcaagagcctatgacctacacagctcaacatgtccccccaaatctctcctctcctctccttccctcgcctactctgttccagccacattgccttccctgttgctttttggacatgccagatgcacacccaccttggccctttgcactttttccccagaattttcttcctccaatatccatgtggctcacaccctcacctttgtgatgagatcacactgacttcgtattcacaattgcaatatcccctaaccctgtgctccctgtctggctcagcttgctctgttatgcctcatggtacttgtcaccttctgtcctatttgagtcatgatgcatttgtctatcatctatctccctgcaatgaacatccctggggtggggccagggtctgttttgcttggtgctgcattcccattgccaagaagacctcacaggcatatcaagcacacagcaggtgcataacacttgctgagtttgctgaatgaatccctcctctgtatcctacacatccaactggtcaccacgtcctgtgcggtagatgtcctttttagcaggtcccctgcacttcactgtgtttgttaagccttggcttgctctgtcatttcattttgcttaggtggcggcagcagcccctgacagcccctggcctcacagcccctggcctcaacccatatcctctccactctgcacacagctgctgggagacttttccttaaaacttggtttctctcctttcccttctgaaaactgtcagtggcttcctgtggctcagaggaatcaatcgaaacatggtgctgctcacaaggaaacacaacgtttctagggccagtgctgtctttgtcctgccttcctccaaattcagccacgttaagcctcaagcagatcctcccacatagctgggcttcttctgcctttctgccaggacttgctgctcccaggagcctcctcccccagtccctgcagccccaggtcaggtgtctccccacccagcctggctcagctgtcctttcccgtgcaactacaggttcatacaatttgctattgctccatctactctatgtgactcttggtttcttgaaggcaggtatgggactctttctttccttctttgctttcttttctctttctctttctttctttttctttctttctttctttctttctttctctctctctctctctcttttcttttcttttctttctttctttctctctttctgtttttagagactgggtcttgctgtcacccaggttggagtgcagtggtgcaatcatggctcaccgaactcctgggctcaagtgagcctcttgcctcagcctcccaattagttgggactacaggcatgtgccactacacctggctaattgttattattattattattattattattatttttgtaaagacagggtcttgctctgtttcctaggctggtcttgaacccctggcctcaaatgatcctcctgcctcagcctcccaaagtgctgggattccaggagtaagataccatgtctggcctgagaaattttctaaaaggcatgtttttgcactgtccaatatgtttttctttttatcccagcctctagcacaagtgcctgactcgaacgaagcagggactctgaaatatcttgaatgaacaagtaaatggcacttgaataggtggcctctaatgtgcagaggaaggaaaagggagctgacgctttccgagtgttcagtaccttctaggcaccatgctgggccttttatgtagttctcgatgaatcctcatggcatcccgctttgcagaatgattctagttacccagagagcaagtagcccttagggtcaggacatgcatctgagttggtctagtcccaaagctcctggtcctctcctgacatcacttaaacagagaaacagaactccccttgggcttctaggggcgctgggttcaggaggcacagccactccctttgttcttcctggcagctgccccaccagcagtgagcccatcccacctctgggttttctttttcttttttcttttttttgagacagagtatcgctctcttgcccaggctggagtgcaatggcgtgatcctggctcactgcaacctctgcctcccaggttcaagcaattctcctgcctcagcctcccaagtagctgggaatacaggcgcccacaaccacgcctggctaattttctgtatttttagtagagacggggcttcgccatgttggccaggttggtcttaaactcctgacctcaggtgatccacccgcctcggcttcctaaaatgctgggattacaggcattcgccactgcgcccggcagcctctgggttttcacaaggctggtctggcgaggaggctagtcctcctcctctctccatagggggcatttcccctggagctcagcctcaactcagcctagaaccttctccaagggtgttcctgtgattgcctgctccactggggtttgaggggtgatagcggcttctggagtgtgcgtgctcggagcatgcttcattctgcttacaccaggccgtgtggcatttgctggcctgtatgtcctcaagggcgccttgcagggcatgccacatcaggttcagctccacgtccatccatccagactgctcagaagggctggggtggggcttgctagctggagagagtatcagaatgaccccaaactcctgggagaaaccctaaagagctgcttggccatctctttcaactccttcaagtctttgctcacaaagtccctttcaggcttgaagtcagatgatgttggtgccctgcccaggggtccccaggtgctgtgttggcagtcagaggctagctgttgccccttctctggacaactgccctcagtcaatgggagctgcttcaactgggtccatgacacctgcttcccaaggggacagcctgcagccaatgacagactgatgtggtgatagagaaggccggcccccttgcctcagcacagtccagttctgcctttcttgccccagggatccctgtggggtcgggctaaggccaagctttgcctcaaccacaccctggctttagctcttcccctctggcttcccgccctccctcacaggtgtctcctgaaattcctctttcaaaaaattcctaactgggcacagtgatgcatgtctgccgtcctagctacttgggaggctgaggcgagaggactgcttaagcccaggagttcaaacccagcctgggcaatttagggaaaccctgactctaaaaaataaaataaaatatttatttttaaaaaaatcatccaggctgggtgtggtggctcacgcatataaatcccagcactttgggaagccgaagtaggtgaatctcttgagcccaggagttccagactagcctgggtaacatagtaaaactccatctctataaaaaatataaaaattagccaggtgtggtggtgcacacctgtagccccagctacttgggagactgaggtgggaggatcacttgaacgtgggaggttgaggctgcaatgagctatgattgcatcactgcactctagtctgggcaacagaggtgggtacatgcagccacttgcatggtggctgcatgtacctgccttttttttgagaccctgtctcaacaagagaacagatcacctagcaccatgagatctgttagaaaaaaaaatccttcaagaagaacccctatctcaaacgctgcttctagggaacccgacccaagacattctttgtcagtgcagtgtcacgtcttcaagtgcttttcgtggtccccaaaaccttgggaccagggattagcccttagtggccatcatcactcttctgccccctgctgggaaaggtggggcctgagtgtgcacgtttgtgttcatttctccccattcaacaggaggcttgcagtggggtgggggggtgagtgtggctgcatgaacccacctctgaggagacccagtaaggacgcagggaggagatgaccaaaaacagaactcctgcccgctcctctctgtttcttgttcttgttctcccatgtgctgagtcgccatccagctggctgggctgctccagcctgccttccccattccctgtattggggtgcccgtgtcaggagtctaacctaacgtttgggggactgggcatcctctggtcagaagaggtgaggcctctcctgtgtcagcaagaaaagccactctctggcttgttggctgggccagcctggcccacatattgttggggaaactgaagcagggggtttgtttacagcccagattatcataagccagtccattttcctaaggaacaggaatggccaggcctgcaggagctgctgggacgctgctaaggcagggagggacatggctggagctgagcaactgactggccaagccttgctgaggacagacggcgctgaagtcaaggggcggactgtgtgattaatagcactcttttggcatcaccagaaggaacttgttcttggcagattgtcagaattcacagccagccttgctcataacttgtagatgaccatgaaatatcaggctgcaccccagcctcccccatcttcctaccctgtcctccactgggacttttctatccatagtaagccattcccctgtccacagagatacacaggagtaaaaataccccatccttctagatattcagtctcctcccaccctgccagcagggctaggagagaaggaattcccagccccagactcccttcctctcccccagtttgctcagctgctcacgcaacggccctaaccttggagctcagtagcagccttccccaggagaggctgggacctctgcccctcacaggcctcttcgctacattataaagggtcagcgagcctctctaatacagtacacttgagccaagacctgaagaccctgtgagggagtgagccatgcatgtatttgaggaaagaaaattccaggcagagggaagagcatgtgcaaaggccctgaggcagcagggtacctgacaagttggagagacacccgggaagttaggaccgccaaagtggagaaggggaggaggagagtggtaagagataaggccattttgaaggggacacagtcatggaagcctgtcaggaagaggtgacctggatatggtccagatctcaaatggattgtgaagactcgaaggggtgagtcgagggcaccgtgggcctgctataccaagccgagcctctcacattccttgcatcaccaattttctgtggtgagaggtaactgacagggtcctttcacttgagatgcgccgggtgtaggtcagaagtccttctgtgccctcgtgtttgcttcaggatccttgaactacctggggctggccccagactcccttctgtagctgaggggcaggtgaagggagggcagctcctagagcaacggaggctgcctggtggagcccaagttcagggagatgagccataggcctgtcccgcatcctcttgcatcctctaggtctccaccaggccccacccatttctctttgactctttttttccctcctcttctcccttctctcttcccacattccctcttcctcccccttctttctcctctttgttgtcacttcttaactcacttatttcctgatttgtggtcttggaatggccacaccccaagctctgagtgaccacggctgcagttctgccccacggccaggctggcccctgatccaagcatgagcctctcggctctggggccacactgacaaatggctcctgggtgtgagcagagcagcactaatacccggggagagaaggttcccaggcagtgaccatgctgtccgggagtcccagcactgagccgcctgggctttgcccactggcctccacactggctttcagagactcaagaccctgttctcctaggtgaccacttgcaaagtgagggaagtcctaccctccagcgtgctcagggtgcacggtggggctggggggtgcacggcaggcctgggctcaggcgggggcagagatgggcttagggactcagagacttcctcagggactctgggggtctgccagggtctgggagaggatcaagccatgcaggaaggggccatgtcccatggcagtcctcaagatcccctcttggccggtatccaagacatggaagtgagcctgggggatgtgtgtaggggctgagggcttcggtgggatggaaagctgaaaacatggcttccaactatggcccttaaccctggccccaggccgacctctgacccaggcaagaaataacatggactctgggaccaaagtcgttgggttccaatgtcggctctgacacttataaactggggggactttggtcatattactcaacctctctggtgcctcagttttctcctctgtaaatggggctgctaatagcatctacctcataggactgttagggggataaaatgatttgaacagcacctggcacacaggatatatgggtttgtgattaattagttaattaaggtgggagagtgggaatgggaaaacagaacagactgagggatgtttgggaggttggagtgtctgagtggggcatgaggaggaactgagactgatgctcaggttcctggcttggactccagaggacagacagagatgccacttgccaagatgaagaatttgggggaagtggcaggctcgagggcagaagcagaaaggtgggcctaggagaggaccgagcccctgtggctggggcgtggaagtgtggtagatggaataatgcccccaagatgtccagacctgtgaatgtcacctgcacaggggtcctgagatgggcagattgctctggagaatccaggtgggcacaaagtaatgacaagactcctcagacaggaaggagggaggcaggaggctcagagccagagagggagacgtggcaacagaagcggcagtcggaccattctgcggatagatggaggcagggccatgagccaagacatccagtggcctctagaaggtggaaggggccggggagagaattctccctgagcctccagaggaaatgcggcttgctgaggcttggatgttaggacttctggccttcagaactgggaggtaatatattctttgaagtcactcagtttatggtaatttgttatagcaggaacaggaaatgaatacaggctgtctgaggggctgctgggaccttagcagctggacttggggctggagctgaagagggtttgtctggaaatgtggatctgaaggggagaggggtctccgaggaaggctgagaaggagcagccagaggaccaggagggagatgggagagagatattaagggtcataagaagaaaggggagagggacaaactgacatataggagtgaatgaaaggacttaaaattttgagacccctagctagatgtggtctcagctactggggaggctgagatgtggggaattgcttgagcccaggagttggaggctgcagtgagctgtgatcacacgactgcaccccagcctgggcaacagagtaagaccctgtctctttctttaaaaacaattaaaacaaaattttcactccattattctgctctgagagactccatctcttgaaaaaaaaaaaaaaagaaagaaaaagagccctctgaatgtgaggatctggcagcctccggtgacagtgccaaggcagatccagggaagtgtgtgcccttagccctggggcaggtgtgagaatggcaggagctaccctgagtagggctgatgcatgtggcaggtgggaaaaggtgtcctaatcaagactaatgtcaggatttttttttttttttttttgagatggagtcttgctgtgtcacccaggttggagtgcaatggctccatctcggctcactgcactgcaacctctgcctcccaggttcaagcgattctcctgcctcagcctcccaaatagctgggactacaggcacatgccaccattcctggctaatttttgtatttatttatttatttatttatttagtagagacggggtttcaccatgttggctaggctggtctcgaaatcctgacccaagccaccgtgcccagcctgagaggatattcttttaagagttaagagggtcggctgggtgcagtggctcaaacctgtaatcccagcactttgggaggccgaggcgggcggatcacttgaggtcaggagtttgagaccagcctggccaacatggtgaaaccccccccgtctctactaaaaataaaaaaaattagccgggcgtggtggtgggtgcctgtagtcccagctacttgggaggctgaggtaggagaatcacttgaacctgggaggcagaggttgcagtgagcggagatcatgccactgcactccaacctgggtgacagagcaagaccctgtctcaaaaaataaaaaacaaataaaataaaataaagcagctactaatctttaaaaaaaagagttaagagggtaagtagcaaagaatatgcttacaagtaggtgaaagggaggaaaagactacagtgctaagtgggggaaggctgaggacaaaagggtccatgggattgagggagaatctttaagaaagctctggacatgtcgatgtgctatatgtgtggacagaagagaggtaggagacaaagagggttgaggagtaactgaaagagtaaggctccttagaaaggaaaaagggttgagagagagtcagagcttacagaggatctgcaggacttatggggagaccctgagggctgcctcgaggcagcagcctgactatggaaagtgtgacttttctacagcaagtgctcagctagaccctggtttgcactagcttgctacaatttcagaaatgctgtgagctctctttggaatatttacaccatgaaaataggcagatgctataaatcagcctccatcccagagccaattgtgtaacatttaccaggacatcatagggaggaatggtctaattcaggatctggggctcacagaaataggaggaagtgagggaattaaagacggcaagagaggatgaagcaacagatcatcctctgggactagctgactaaggaagggatgtgtaatcgactgggagacaaggtgagggcagggaggtgaaggcttggtcaaggctggggttgatgagcaggtgtaatgggaaccaagcagggaggacaggagcagatggactcaggaggaagagcttcactgaggattctgggggagggagagtaaaatgggcacatggaccagggcataggccttggaggaggggaggaggggaaggtcattgtagtctcaaggccagagtgtcatcatgggtcagcctcagtacagtggagtcacactgatgaccagggtaggggtgggagtgaggaaaaaacagtgtgattctgatgcccagatctttaatgaatggagcagggtgatcaacagttcctcagatgtttgggacaaacatatcagcaggagctgggcagaggacaagatcttcaggggaggggaaggaggaatatatgtccaaggacagaagtccccatcagtgttgtgtttttcttctactgaaaataaaatgtacttcctagatctgtccattgaatcagtgaccaactcagtatcaatgaacagctcagtcatcttccattgaaacagactagggctctttagggaaatggctaattccaggtctagggcagaaaaaatgcaagctgagcctgaagcatcttatcagatcagaaagcaaagaagagctcaagatgctccaggttctgccaaagatctcagaagccaactggaaggagtacccactggccaagcccaaaacaatgatgtctgtgatgtgttggaacagcaaggatgtctaaaaataatgacattaccatggtactcaaacagcctcagtggtcacgtctggaaagaatgctagagaactgactcttcctctgataaataaagaggaatattgaacatcttccctgcctttgctgtacagattctatttaaccaaacagctagtggtgaaatcattttagaatgctagtgaataaatgaaggaggtatgataggattagaatatccccacttcaagccccagtgatataatgggtccaggccatggtcaatggctgccaaaaccagcaggtgaaaggccgatgggtcactttgtaatggacagagcaggctgacagcacatgaattctggtcaatcttgacaccacagaaaagaagaattctttccaggccaaatctgcacccaggaagtacagggaacagagggacacattaaatggcactgtggagatgcaaactccaaactacaggatacacctggggacaatctggtgtcttcactaaataaatggaaagaaaaaaaagcagtggaggcttaccgagtaaagaaacctaataggcaaatcgaccatatgcaacgtgtgctccttctgtggattctgcttcaaacaaaccaaccaaaaatttacgaggcagccagcaacatttcaacactaagtagatatttgatgatattaaatgattttatgtgttataatggattgtgggctttttttttttttttttacagttattatcttctagaactatatattgaaggatttacagatgaagggatactgtatctggatgttcttcaaaataatctacagtggccgggtgcagtggttcatgcctgtaatcccagcactttgggaggccgaggtgggtggatcacctgaggtcaggagtttgatatcagcctgaccaacatggtgaaaccccgtctctactaaaaatacaaaaattagctgggcatggtggtgcacacctataatcccagcttcttgggaggttgaggcacgagaatcacttgaacccgggaggtggaggttgcggtaagctgagattgcgccactgcactccagactgggagacagagagactccatctcaaaaaacaaacaaacaaaaatccaaaagaatctacagtgatgggacagtgggtgaggatggaaagaatctaggttagctttggggtgaagctgggtcacaggtacacaggggttcattatactaacagggttctctctatcaatgtatgtgtttgaaactttccatgttaaaaacatgaaaaaaacccaaccctagctcattgcttattcatagtaattactcaataaatattaactgtcctgttaaagattttttttttaggccacaaaaatggggactcacccccaacccacaacaagtaaagagagttgactttaaatagagggctgttatgctaagcgaaataagccagtcacagaaggagaaatactgcatgattccacttacatgggggtctctaaaatactcaaatgcgtagactcaaagagtgggatggtggtttccagggagaaagggcgctaggaaattgggaattgctaatcaatgggcataaagtttcagtttggcaagatagatgagttctaggggtctgatgtgcaacagtatcacatgatatgtatccatagttaatgatatgtagttaatgatatgatatttacacttaaaagtgtgttaagagggtagagctcatgctatatgctcttgccacaataaaagaaaattaaaataataaataaatggagggctgtgctttgccacccagacccttggtgtggcaggatgggaatagaacatgggttctaccgtttccttcttctgcacacatttactgagcacctattatgttccaggtgccacaaagcacaggtaggagatgtaatgccagccctttcttcaggcttttgggccgggagacaatgatgccattactgaagacctagcacaaagcatcccttgcctctccccttcatccacagacccctgcacaacctcaggcagcctgtggagatgagtcctttagcacctggccgactctcagacatatgcataatccactctccgcacggggccaccaaagtatgccttccagcctggacaccaattactaagcagggctcacagcctcccccctgcctcctcctgccttctctctcactgtaacaaaggcataacatgtagacagtcaaatttagaaagcgtgtgtatctgaagcacacagcacagcctgatggctctgcatatgcatgcaccaatgtcatcactacccaggtcaaggtatggaactgtcccagcccttcagaaagttttctagcattctcttccagttagtacactcactgcacacacacagatgggtaaccgctatcctggattttatcaccattgataagtttcccctgtttttgaacttcatctacacagaatcaaaaggtgtgtacaccttgagtttcagacctggcttattttgcgcagtataacatccatgaaattcatccatgtgtgcatcagtagtttgctatttttccttgtaccgtggtccagtctatggatacatggtttatttatccattctcctgcagatggcatctggcctcatctcttgacccctcttctcataggctacacgttttacgtctcccaaaccacagagcaacccagcaatactgctactcctgtgcctacgtgtgtgtagttccctttgccctcacacttcatgatgcatatctgaatattgacagttacagtgcatcgtgataaaagtacatgcagagtgtttcagaagcacatgggacatctaagtctgggggtggtcagcgacacaggcactatcacagagcacagactcacaagataggagagaggctcaggtgtggctcacagatggctggagtgggacattggctgggctgtcctgggacttctgatatcagagcctctgcccagcttgtatgccttgaggtgcatttgaggggggccctgggctctgagtctccgggctgctttgagtggatggcatttggaaggtggaggtcagtgatgctcggtgatctgcccaacaagagagagctgggatcgaaagcctgggagctgtgagtggtcactaggagtgacaggggtggggctgttgtgtgtgtgtgtgtgtttgtgtgtgtatgtaggtctcggcagacagtccacctctgggcgtggctgggggacacttaccaggcagcccaaacccaaacgcagtgagatgctgccgccatgaaaacacgcaggagggacacgggcctctggaggctcccgggagaggaggaagcttctctgcagttgggtgcttgcctggggcagggtttccccagcccctccggtacccctcacacccgcagggaggatgatctgcattctacacaattggcctagacctctagggtcaggggattcttgcacgaagcttctcagcgcagaggcttcagaggcttttatcagggacttttccaacctacccaactgtcccaacgacgcagccccgccgcagccacgccccctctctctgggtcctctctggaagtccgcaggcagcaggctctcactgcggcccctcccacactcactctacaagtctgggctcctcggggcatccggctgaaggatcccgatgaggagggcagatttagacaattccctgtgattttccgtggcacccagcccgcaccagcttgctgcggtgagggtaggggattgtacctggcatgggcggggctgccaagagcacttccttcacaggccccagggattggtgtcactacgttctatctccaaagtggagcatctctgactgaaaggggagcactactagctatcccaccggtcacaggcaaggaacgggactgtcctgggtcactatgcacggagcaggcagctcaactgggcatcaccacggaacgtgggcaggagggtgccctcccctctctctcggtgaggggcgttctacacgcacctccgcacctctggcaccagcagcttcctgggggtcccagaggagctggtgctgccctccccagccttgctccctgaaatcgcagcatcggggcacttgcggtctaatgagctggttgaccctctgcctgccttggggacatgctctgcagttgttcctcacagggaaagcggggcagctggaagtgtaggggatgatccccagctactctctgggattctctggattttaggtgcccacatctgtgtcccagtgtctcccagccagtgacttgggtccttagatgcccccacagttcaggacagccctcctgtggtgctgcccctctggcctgaccacagcattccaggtttacaggtgacagcccatggctcacagtgccaatgttcctctggaactccgggcccttccctgagactcttgatgccctccaggccgctgtggctgctgctaccacctggctttgtgtgcggaagtgtgagtgagggcaccccaggtctgctgtggccctactgggtgcctttacttccagggcctatgtgggcccattccttgctggcatatacattgtttctcaatctctccgtctctggtgctcgtcacagctagtgtggtgaccaggacctgggaggaggcaggtgccacctcaacagccatcctgctcctcctggctgcctctttttctgcctcctttgggtctttcaacgtcaatgctccccaaagctctgtcctgagatcctcttttctctctcctcctctttctgggagactgcactccatgctcctgcaaccatccccatctttgatccctgcatccaagtttccaatgttctctatcccctaccacacacctggtacctccacaccaacatataccagcccctgggggtccacattccccccaaaagttgctgctcagtgttccctgttccttcaaaggtatctccctcctcccaggcctgggcctcatgctgggggtgtcaggacctcctggccccctctccttcctgcacagcctccagacccctcctgctccaaatgggctctgccctccctctctgctgcttctgccctccaagccatactggggcagatcggaatattttgtttccttgtttggcctctgtcctgtttgctcatcattgccagattcaactcaattcagctccaccagtgtccctgggctctgctctgaggcactcggaaaggtgccctgagaagcctggtgcagcacagaccattaggaaggaggatttagggcctcctccaccccccaattccctacaccacatgtgaggcgcagcagaaatgtaaggattgagaaagagctgtgcgtgccagcaaggagcaaaggtcatggaaattaagggatgacttcctggaagagggagtcacgtgacgtggacctcaaagaaagcagtggccttttgcagtgttgattggaacaaggaagagttagaaaaacctaacattcagcaggatcaacgcactgtggaatactctcaaatgtactgctgtgaaaatggcccagcatggataaatctcagccacataatgttgggtgaaatggcaaattgaagaacggtgatacgcatggcaaggtgccattcatataaatctcaaagacaaacaaaacagtatattattatggatacagatgtttgtagtaagagtatgaacatctgtataagagtgatatactccagatttatctctggcgaggcagggagagaaagaggaagggacaggaggaggggatctagttatggcttgttctatttatttgaaaagagagaggaaggggtctgaggcaaatatggcaaaatgttaacatctgttcagtataggtgattacaggcatgtgggtgcttgttttattgttttctccttatttgtgcattaagctaaaattttaaaggaagttaaaaggaaaaaaaaacagggagctggcattctacacaggttgggcgttccctacaggggcccagtgtgaaccgaggggcaggggttgaatgagggcacccaggagcccagcacagctgggcaaggctggagcaggggctggggcgatgggcctgggggatgggcttggatgtctaaaggggcgggcaccaactttctcttccctgcttacttgcctgcttctcctagtgtgttgcttagggtccgttgcttgccccatccctgcaacaacctttggctggatgattttcaagggttacttattcattccttaccctatattgagtatccactacaaaagctacagttccacgatggccctatagataggcatgattaccatcaccccatctctattttatagataaaaaagccagcagagaggggttaagggatttgcccacggttacgcagctagcgggagggaggcagagctgggattggcgccagagcctgtgatcctcactgcagtgctctcttttgctccccacataccaggcccatgctgagtgccgtggactcagtgatgacccaggtgacacagccctgccctcacacagcttctgggccagtcccagaaacaaaacaagcagcacacagatgtaattacaaccaatgatctagtgaaggaagcgaaccttgtgcttcaagggagaaaacaaggacaccactgagggtcatgggtccaagaaggtccctctgaagagggaacatttaagccaagacctaaaggatagagttggccaggagagattgggaaggacagcgaagtcggagagaatagcaagtgcaaaggcctgaggacaggcaggggctccagcaagaaaccagaaagggtcagaggggaggagcccagagcagagggaagcggcaagaccgtgacggcagagagggggagggcagagagggagatggctctcatttgagatctccattgtaggaagggggaccacatgtctgcatggccccagttccagcctgtggtcccagtgtaaatattcatagtgtcctattttggttcggacaataatatatttgaaggtcaccctctcataggtgatgatagagagtttggattttgttctcaggacagtgggaaagcattgagggcttttaataggagagtgacacatctaatttataatatataaagttcactgtggctgcagtgtggaaagggcttccgggggcacaggaaggaggccattgtctctttcctgactcagcctggcagtgtggaagggtccaggcctgggagaggcagagaaggcccggcttgggcctgcggaggttgcagccatgggtggatctgaccccgggcaaattcatccccagagatgctgttcccccactactccttgcactggtccagcctccagtcccagacccagggcttccaagacaggcctcaaggggtaggaggcggcctctgaagacagctgcctacctcccaggactgcagcacagcttgtgaaagaagcaggaaagttcctcggaagagctcaaggactcagtaagctcaagaaataacgattaacaatatgaactttccatttgataatttatccccatccctgtgcttctcattgccactcagcctccttcctttccaagaggggatctcagaaatgagaactcggggcactcagaaacaccagctggggagggtcccaaatggggccagcttccaaactgaatgagtgctggggaaaagcgggtggcttctggcatctgctgatgtacctgctgactggccagggcttgctacccatgaatgaacacatgtaggcccacccactctgtgcacccacctcccgggagggggatctgtagggggacacatacactgccgaccacatatgggcagatgcccgcccagattttcacagacgttttatttttagaggggccagcagcataagcccaaggcttggaaaagaagaagggaaggacagaaaagttagaagcctgtgaaacgaacctggcgaggatgaagaaccgttccttggcactccacaaaatggtgcatgcacacctgcctcttaggagactcaggacttgctaagtcaaccttctaggttcaggtgggggtcgcccaagtctgggtgccaggagggcaccgccataggctcagggagaacaggaggggccggtgggagaggggtcactcaccgagcggcaggacaaagaagaaagggaaccagcagagcacgaagacacccacgacgatggccagagtcttggccgctttcttctcacgggagaacttgagcaggcgcacggagagcgagctgcggaaggtgtggcccttggcgctgcgcatgccgtgcgccccgtcggcgcccgtggccgcgccgcgacagtggatgcgcagcaccacctcggaggccttgcctcgctcgcgcttgacgcccgcctcgaggctgcgcgtggtgctgcgcgcgaccacgtacacgcggcagtacatgaccacgatgaccgccatgggcaggtagaaggagcacacggaggagaagacagcgtagcccgcctcctcggtgataccgcagaagcgctcgtcagggggcacgggctccttccagcccagcaggggccctacggacaccaccagggctacgacccagagcagggccaggatggcggccgccttgcgctcggtcatgatggctgggtacttgagtgagtggcgcacgcccacgtaccggtccacggagatggtgcagaggctgaggatggaggccgtgcagcacagcacgtccacggcggcccatacgtcgcagaaggcgcggccaaaggcccagaagcccagaacctccatggtggccgagaagggcagtacggtggcgctcagcagcaggtcggccacggccaggttcacgatgaaatagttggtgacggtctgcaggtggcggttgcaggccactgagaggatgacaagcaggttacctgccacggccataaggatgaaggctgccaggaagacgcccacgcccacgccctgcgcgctcaccaccagtcccccgacggccgccgtgccattcacgtcgccgcccgcgcccgcgctccccggctcccccgcggagctccggttgtcctcgccgctgcctgcgcccaccacgccgccgccgccgcccgcgccccccggcacgccgcccaccgccgggccctccgagggggccgcgccgcccgcgctgcccccgccgccgcccgcgctggagccccctgcgctgctgtccgggcggggtccctcgaaactgacgctcaggagatcgcggaaagtcatctcaacgcgcggccgtcggtggccgggccggggcacagaacgagcggccggcagggaggggagcacagggcatagccgcggggctccagatgcagctccgcgcacgggtcccgtcggggtcctgcccaagttcctgtgacgcggagcgcggctgtccgagagcggagctgcctggcccgggcggcggccgggctccccgaggccggccgtggagtagcaccgaagagccggggcccgctacgcgcgcggcgctctgagcgtgcccggcaagcgggcaaagcggcggctccggggccgggcggtgcaggcagcggccactgcggcgctcccaactcggcgcggggggcgggaccgaggaggggcagcgccaggaaggaggagggggcgacccgggccgagagacgggcgccacactccagggtagaagggacccttcgctcaggacaagcgattgtgtcggggtccggggggctgcggcgctggcgcgcgctcgggtcccgcagcagccacccacgcctctccgcaggtgcccaagcccgcgctctcccctagcggtgccctttgcgttccttcccgctcctctcccggaccccctcccccttggccctcagcggcgtccctcttcctcccgccctctcccccgagtctctcggtcactcgctggtgcccttgggcgcgcggtgcgttgaaggcgtgagtcccgggtcttcgggatcccggctttggccgccagagagcagcaagcgcctgggatctgcggactgcggaccggacggcgcagtgccgctgcgggttgcctcctgggactgcccgcatggatctgccgcacctcctttttctcacgccactggccagggcagggtttcagacgcctctgtccagtgcgatggcgtgaagagagcccaggaagggtcggaagcctgtgctgggcagaggctgggtacgatgggctcaggagcagcaggctgtggctacagccctcggaccctgcccaagacacgctggtctacatacgccaactttcccactgttacttttccctgtatcagatgcgggaataaacctttctatagctaccctaaataaggggccttgttcttgttctggcctttttaagagggagggtttaagtgccagagggtgggaaagggcacttggcaggatggttaagcggggcgggtgtgagacagtctggctccgcatctgaatccaggctccgccccatattaacagcggaacctctttgtgcctcagttcctcaactgtcaaatgagaataagaagtgatgtctacctcctggcctgagggttaactgagtaaatatgagtgagggccccagagcagtgcctgggcatgtcagcggagtagggcttcttcagggcaggcttttaacagggaggatggaaggcgaggaggtgtggggctggtatggaccccgggtgcagatgtgggagagggtgtgagaagcttcttgagcaatagcaggactgggtagggagaggcacaaggaaatcatacagttagccaacataaaaataccggctgctggcacgtggcaggcaccatgctggatacactaactgtaaggagggtaatgccgtctcatagttgcagaatgaggagggcttgagccctaccagggagatgaaggcctgtttgcagaagtgtctgggaggggacggagaacccatagccctagtgttcactggttatggttgacacaggggcaggatgtctgagttctagatgagaagctgctttggagaaaaagtaaaaaactgcagaaatgtttagagatgggtggcctccctcctccccattgcccagtccaggaagataaggcttttataatcatagcttggaaacagctcttccaaggccttccccattaaatcttcttttattttggtttttggaaacttactatagtgagttgaaacgaaagcaacgtggcttctagggattagctagcagctgaccaaaagtaaaatcttgggtttgggcttcctttctgagaggggagggacagtgggaactgaaaggggaggcaaggagctcctctctggagggtgttaaatggcaagtcagtgtccatggttggctgctatcacatagtgtgggataggggcaaccctggtggaatccatttgattctgggattggccagttttcaaagactgggaagaggagacaaagttaaacctagggctggggctggggtgctgggggctacttgactggtgtcacatagagatctgtgcctgattctggtgtggagagccagcagaaggctggctggaggtgtccttgccagcagtgtaggaagacttgtgggatagaatgcctggaagaagacggggaagtctttccccatttcaggtcttggtggtcgtcataaggtctgcaagatgattccagaggttctgaagctcttggggaatgaatatggaaggacagcggttgtgagatcgttgtgagtttcctgtacctgcttatcagaggctgaaatccgggaaggggtggggacaacgtgctggtggcaggggcaacaagagaaagagctatctctctctgaagggaggttttagcagtggagggctgggataaagctcaatatcatcccaagcacaccattcacacccagatctttgcttggatgcctcatgaggacctcaaattaagcatgttcctaagttaaactcaccatctctgacactaaaatcttcaacttactgtattcacttatgaaaatggaaccagcatctatgcaattgctgcagttagaaacctaaactcctctttctgttttactctccgccccaaatctagccagtcctagagtggtgttgattgtgtttgcctacttgactttgtgaacgcatccccttctctccaaggtctctgcctaaggtcaggccctgatcacgcctcactctgattttcattcgtactccaataatgcctcctagtctgttgctatatgggccttcctaaatatgaccattttactcttttaaaaatatttctttgataactcaccagtgcttttaagttcatagcacacttagtcttgtgggactggactctttcctttttcttacctttttttttttttgtgggggaatgcgcaaagtaagttgtttggaaggtgacttgcaggaagcatgatgaggtggttgtttctttaaaatggatgctgctttgaaactgggccacatgggaccctgggatttatttggattataatgaatgaatgtgagtcagaggcttttgttcccgaaatgattcttacatgagatttgtgttctagcatctcatacatgaatagaatgctgtccagagggacatcctctggaaaaatggctagaactttcctatctgaactcaaggtccagaaactgagactctcaggcacatatctacagcattttgtttgtttgtctatttatttatttatttatttatttagtttttgtagtgacaggatcttgttatgttgcccaggctggtctcaaactcctgggctcaagcgatcctcccaccttgacctcccaaagtgctggtattacaggcatgagccaccatggtgcccggcctccaaagcattttggtgtggagcctgtcccctccagtcatccttaagggcttcctggaggaagcgaatttcagggagagcttaaataccctttgggtcaagagttatcttccatccttcatcattccttactttggctggcctgtgaaagtgggaccatctttctctaaagaaatgttggggctgggcacggtggctcacgtctgtaatcccagcactttgggaggctgaggtaggcggatcacgaggtaaagagatcaagaccatctggccaacacggtgaaaccccatctctactaaaaatacaaaaattagctgggcgtggaggcgtgtgcctgtagtcccagctacttggcaggcggaggcaggagaattacttgaacccgggaggcagaggttgcagtgagctgagatggcgccactccactccagcctggcaacagagtgagactctctcaaaaaaaaaaaaaaaaaaagaaacgttggagggctttctgaaactgccatgtgtatgatctgtcaatgttctcagctgaaggatactgttgggtttattcctttgggtaaaatatttgccacaggtggtagaggaagaatggttgggcctggtggtagcatcaattgtgatattgtgatatgatgtgaactcctctcccttactccatcaactatcctctcagctgtccctattagagtcaagtccctagcaggccgtatgttttctaaatgcagagcctttcctggggcagcagggaagtcatcagcagttttggtaggaactcttacctaagagtcaaacattggtgtcctggctctgtgcttcctccctatatggtctttggcaaatatttggacctagttgtctcctttataaaatgtggcaaatgggattgaactagatcagagatcaaagcaaggtaattctttaagtgaagtcttcatagaaacccaatgtaggctggagatggtagctcacatctgtaatctcagcacttcgggaggccaaggcaggaggatttcttgagcccaggagtttaagaccagcccaggcaatatagtgagaccttgtccctaccagaaaaaaagaaaaagaaaaaaaaaaaagctggctgtggtggtgtgcagctgaagtcccaactcctctggaggctgaggtgggaggatcgcttgagcttgggaggttgaggctgcagtgagccgcgatggcagcactgaactcagcctgggtgacagagcgagaccctgtctcaaaaaaaaaaaaaaaaaaaaaaaaaaaagaagcccaatataaacaagcagatatttgtggagaaactttggttggatcataggcaaagtcctgagaccctcgaggcctccctctcatgctgcatcccattccctgaggcattctcatggccttgtgagtccaggagccttgtgggcaaattgctggcccagtgagccctggagaccctgttggtctgggggttctttgtgatttggcagtatggcgcccagtttagatggaagactaagcacctgcatttatctcttctcccttatgagacctctttagagtgacagcaaggaaaaaggagcggtttgtcttacaactgagaagttaactcctatgctgacaaaccctggactctagcccctaaagaggaggcttgatggaaccctgcaaggggtcatgaaggcattgaggagttctggaccgcctccttgcttgtgaagatgatacagattgattggcactgtcagagtcaggatgccgaatgggagacaacggtggtggggaagaaattcatgacagatgtatcctgtttgcgggaaccagctggtcaacccccagtttcctcccaccccatcaagcctgggcagcctttattcattcattcaacacaagttaactaagcaccagctatatgccaaggaactattctgggcactggggagatatatatacatatatatatatactttttttttgtttgtttgagagagatagggtcccactctgtttacctaggctggagtgcagtggcatgatcacagctcactctgaactcaacctcccaggctcaagccatcctcttgcctcagcctcctgagtagctgggacaacaggcatgcgccaccatgctaggataattaaaattttttttttttttttgtagagacagggccttgctatgttgcccaggctggtctccaactcctgagctcaagctatcctcctgcctcagccttccaaagtgctggttttacaggtataagccactgtgctcagctcatgataaataaagcaaattccctgccatcctggggcttgcattcaaatggcagagagtgctacccggaagagttaggaggagagtttcgcattgccatggacaaaagttttatctgagtttgatatttgggtcttgaagattctttgcaatgaaatcgccaaagaaaatccaaatctaaaagaacccttttccagtacctccccgtcctagaatagcagtgggagctgactgccagaccaaagggtgcaaattcatgcatgtcattggaagactttgttaaagctgccacttcctgggatcaactcctatgaagaatatggacatccattccattcttcagttgcgaattgatctctagccctggtctgaccttttaccttaccatggcctgatcctaagcctggctacatcctaacccataatactgactgactcaaaaccttcctgatttccttaattagaccattcttccctagatccatgctgtggtcagcaaaggcactgagtgaaagggtaaggtctcagtgctaccctcccataccttcaggacagcgaagtttggtgctcaggaccggtcatgggtcagggagtatctggagaaagaatgtggtttctgcaggaaggagtttctgagtagtccatcctctcagctccatctctatgtcagcagaggctggagggaacttgagccagttatgatttgatgatttgtgctaatatttgcctaaaattaatagagttggaaattaatagaaatggtagcgggtagcaatgaaatgaaattcccactcagaacctggctagcagcccactgttctggggacccttggggtggctctttgctttgcagctgtatttgcttctgcttctaagatatattcttttgtttctttttactttcttcaggagaggagataagctgggaagcaggatagtgaacaaagttggaagacacactggagtggaaaactctcagggcagagatttgtcaggatatgttaaaacctgtaatgagcaacccccacatttcagtgacttaacacaataaaacttcatttctcatttactcaaaggccaacgtgaaagtacctgattgaacagctgtcctgggcagatcttctctatgggacaactcagggatctaggctccttttgatgtgtgaattcattgttttctagagacttgggaagctccagagtcctggagatctcttctggattgtctataaaagatatccaaagaagaaagggagagtgtggagaattacatggatattttagaaatcaagcacaacagttgtgtctaagcccattagtcccataccctcacttacttgcaagggggaaatgtggcttagccaggtgcctaggaatagggaatgggtttggcaactgtccagcctgtctatactgcaggacagcaagagacctaggaatactcaatttgggtcttggctaggaaatgccttatagatgcattgtgaaaagagcagagagattgtctgccctgaaccccccactagaactgtacccaggcccagcggatgcttccatgacttttcatgtttgctctttcttccagaccaggcccaacatgaacatttccaccatggcttagctaaaaaagggctagaattgggaatgccatttgggaatgtgctggtgacagttggtgacaattccaactcactcagctctgggaatgcaataggaaaattaaggtgggtatcaggggctcagctaacactgttctaaccttcatagagagtaagcaatccctccctatagaatctacctcatgccaatgggaatctcttaccttcctttatcagtgcctgaaattccacccctataatctgggtctgctaactccaagaaccagtgtgtttctcattatattaaattcatctcctagtagaggtgacgtacaaggtcactatctcctccagccccttagatctgcttagccattgtgggatggtgaactaggaggagtaggggagtcatccagtggggatactcggtggtgatggaaagaaaggtgagaaagttccagggataaactttgctaacctgacaagtgctctggctgccaaatggagcagcgcgtgctaatgagagagatttcctaacgcagaattaaaataggccagtccattcagaggaagtgacctgtaatcaactttagaggccaggcagtgttgcatgactccaatcccaattagggaggctgagacaactcctgctgggatgtcaaccctccagctcatgaataagatggcccagagccattttccatttcctttctcctgggccaagattcaatctctggagaagacagtgaaggaggacttcccttgatgatgattccctggagaaatggaaggatggagaaagcaaaaaattccaactgtcccaggaaaaatattaggaagtgaggctggccttctctactttggagttctccatgcctgaccatttgggctcctacaactctcccttcctctcttctctgtgagttagtcacttaatctttctgatcttacattttcccatttgtaaaatggtgataataaccctgccccctttggggattgagtgtctgtgaagctcccattcatcttctcctttgtgtccctattgtctttgatttattcctctgtagagtagtgtttggtaatttagttgcttaccggtcttattcctatctggagatagtgaacttcttgggtttttcagtgactgtaacatatttgtctttttatgctcagcagccagcgcagtgctcgcttcttgaagtggttcagtgaatgttgagttagtggatgaaaacatgcatcaacaaatgagtaagcaaatgaatgcctgaaggactgtgcacctctgagtgtcactgagggttacagtatatgtctgtgtcccaaggtgtcagcccttctgcaagagatgattggagagggctttcattcatcccaaggagcatagtctgtctagggcaggggtggggccctttctcctaggaggaacgctttgagaggcacgaacacggagctggatcagaggagtacgtgcccctgctgtcagcgtgggggtgactggcccatggaatagaacttatctccaatgtatgccatgagccctacctaggaatcccttccttaggggtggtccctacctccatgtagatggacctgtgtaggaatagcgttgcctggtagtgggtgaataaatctgcttaagcatggggctcagttaataggctcatgtctcatcaggcttgggatttagcagagagtttggagcctagcacactggattttcacctcaaggaagatgctgccgcatactatgtaggtggatttttttccccaaagcaactgtggcggaggcaaagattggtctataagtgcatgaagacggcataattggtgaccacatttcactcctctgtagtaatattatacatccataccccttccatagcctcatggtgggaacaataattgtctttgccccttgacattgagcttggccatatgacttgctttggccaaggggatgttggcagatgtgacaaaagcaggagcttgaatttgcttgtgtgattgggttcgtgttcttgtgcttctgccatcaccacaaaaataccatatttcaggttgccattgcatcttcatgtcagacaccaaaatgagacatctgcagtgaagctatgccaagcaatctgcagacatatgaacgagaaataaatgtttctagctgcatgtcactgagatatcaacggagtttgttatgtagcaaaagctgattgatacaaggcaaaatgagttttttaaatttcaggctttttgacactgacagttgaggaaattatttactgcctttaaatttgcaaggcagcagttactaaagcttaatatacatatagcctgtgatctagaaatgtctatgggggggacattcagcttatgtcccccccatagacatgtataaaaatattcatagcagcttcggccataatacttaacctggaaataactcagatgtcctccagtacagcacagaaggccaaggagggaatgggagtgagaaagtagaggcaggaagttgttgcggatgcaaaaagagatgaaagaacaaatgggagtggactctttctgatggaagaggtttgagtgtgtttataagctttgagaaaagattcaataaggaggtagaagttgaaggttcaggaggaggtgcagagggatggagtaagatgttcgataggtagcagggcgtggtattctaagcccagttgcagcagtttgcttcagagagaaaactagaacagagggtaggaagatgaagatgtttgtaggttgttgggttcagaaatccagaagggtcctgcctgatgtgggtgttggggagttatgggaattaaaaagaataataagattttgtaataaccattgtgggaaatgagaaaggggccagtaagattgtccaggggcaaatatgattgctaaacagtttcaaaagtccagctgagaggttggagaccaggaaattgtgatgctttctaacaagattcagcaacctggatatgggaaccaagaaattaagagatttcttaatctcttaattaagagatttaagagatgtcttaaattaagagattaagaaattaagagatttccacccccacttggcagtcattaattcagggccatcatttaagaagggcccaagggttacatttaagggctaagacatagggaaattttgtgggctgtttgacatatctgccaccggtgtggtgtgtttaaggaagaggttgaacgaaggtggcagcattcattgcagaaagagtagcacccatatctaccaggagtcaatgaggttgaccatctatatttataatagttaatttgccttagatgtttaagggtaaggcaggctattgagtactttttctttccttagagaaccctcattcatctaaattgagatacttttttttttttcaaatgggatgatttttccagtgtcccttctgttcatgatatctaaatatatcctcattagtacaggtgaccagtttggaagtgagccatctatagctctttgatctgcagggctgtaacagttggattctcccattgtccctctcctggcggaacagaaccaacaggatatatatgtgtgtgtgtatatatatatatacctgttgggtctgggtctgtttctctgtatatatatatatatatatatatatatatatatatatatatatatatatatttataaaatatttttttctttatttttctgtattttaaggaattgactcactcaattgtgggggctgccaagtctgaaatctgtagggcaggctgcaggctggaaactcaggcagaatttccgttccagttttgaggcagaattccttcctctctggaaaatctcagtatgtgctcgtagggcctcttaagctgattggatgaggcccactcacataatggagggtaatctcttttacttaaggtcagctgattagagatgtcaatcacatctattaatacaaaataccttcacagcaacatctaggctagtgtttgagcaaacaatggggtatcaaagcctaggttttctttttttgcatgatgagattatagtccaatagatttttattggaaatatttcaggtagggcttttaggagattttgccctactttttgggcctgttttttatcttgaggtttattgtggaaagagggatccaggtcggtccaatcacctttagtaggatttagcatctgaggttctgaccaacgtgtgtaaaattgatagaggtctggtaaccctgggtcacatgcaccccaaataattctaaatttatctgtgaatagttgctggtcttgtctgggtttaggaaaatctgtacttatggttattaattcaattctggcccaaggtttaaattctacagttgcttgcctgtctggctcatgggagcggttatatctttgaggcacctggcatttaagggtcttaggaattattgacaaaggattgggaactggataagggaagaggagggaggagtcagcagaagtgcagagggagagcaattaaaaggataagcgggggagagggaggactggatccagggaaggaacttggggacaaggagctggagattgactaggaaaatgtgtctagtctgctgttgagtttttcaacttgctcattacctttggtcagagaacctttcagtgaagcaattttaaaatcagaattgtatctgcaggcctctgcatgctgatcaaagtatcttattctctgtgttttttaaggtgcctctcaaatgaacaattttgttcaagtcacacattctccacagtggccactggagatccaaatgattcttgatggagttaggctatttacagagagatgaggcacaataattagaattctaatgaaggtctgtgtaagaatcaggactttttcctggaagaggagaggatttttattcagatgaccccatgagagcccttgggtaccctgtgtcctgggtccccagcctgatggttaatggtctccaaagggagaccggacagtttgcacttcttgcagaaaaccagagagaacattctctctggacaaaagatggcagacaaaccttacccaagtttattggtgactcacagcaaagtttgtctgaaagaaccacaaactcaccagtctaggaggttgacttgatcaacagtcctgtgggatatatgcctgtgttctaccctgtgattcttgttctgtgacaaacaataattttgacagcacagcagaaaatggaagaacaaaagaaaagaaaaagaatggtctgattgtaccaaagacgcaaacaaatgggaagaataataaaaatcaggggcaaaactaataataaatagctgagaactcaccgcaaagacagtggagttcagacctagtgctgagttcccacactggtgtggatttgacaagccacaggtggcaaggcacaagaaacctctacaagtaccgcacgcacatggacagaggctgaggtccgtggtgatgggcagtgcagactgtatctcagcaggaccgccaggaaatctgtggaaataaatgaagaccacccacatgagaacagacagaagctatttactcagaacttgcaaaggaatcagccatcatttgcatttggaagggactcaaaaacaggcagagactgggaaacttcacagtggaataaaaaagggaaggcttcaggtatgctgtgattggaggttgttggcatggggacaacagaggtgggcgaactggaagaagggcatcttatgtggttgactggggagcatatttgactttttctgattggtcttgagttggaagcaggggcgaaaaatagggaagctggaagtcattgaccaattcctggccaggtgcagtggctcatgcctgtaatcccagcactctgggagcctgaggccagtggattgcttcgagaccagcccgggcaatgtggcgaaaccccatctctatgaaaaatacaaaaattagctgggcgtggtggtgcatgcctctagttccagctacttaggaggctgaagtgggaggattgcttgagcctgggaggcagaggttgcagtgagctgagattgtgccactacagtccagcctgagtgacagagggaaaccctgtctcaagaaaaaaaaaaaagaaaaagaaaaagaaagtcattgaccaattcctgcctaggattccgggttgattactgctggggtttggcttcctgggctggttgctgcagactctattgttgtatacagtctggccattgtggatttgtatgttaagtccttgaggaggtattgttgcattgttccaaaaagttcccaatctgggtaagaaaatgagatgtacattcaaaatcaagattgtctgtttctgggatcaggcatctgcatgaggccaggctgagggtcagggtgcaggtagagggagggctgggctgtattcaggtgaggagttgggctgtgtataggtgagtggtcagagtagggcaaaggggttggccagaagcttctttcagagggtaggtcaccaatgtaggactgactcagtgaccctggcccagttagccctgtctttgaccagctctgatttaaggtcatgctcttcctactttccaaacatttcctttggcatgaagaaacttcctccagctgcacctggtcccttgggggagttcttttaggcatagtctaaggttggggaggaagtggcatggctttgataataggggacaagggtgaaattgcagcttgcactctctccctgctgtgtgatgaaagcataaacccacctgcacaggaaggtgctcttagactcccctcctctgacaagccggaactgcccccgtgccattgtgttaagaattgagatgctgcaacctgcagatctctcaggttgataggggtgtgaggagatggtgggaatgaaagggggctttgttcctttcattgtgctgtttaatgcatttccttctccatgaaacgttggctgtaggagtaactatcattcataattttcagtcattgcctatctagggtgattgaattgaggggtaacctcacttactgtcttatcacagtgcctaaaaggctacattattgctctactctttcaggctgaacattgctttctttttggtttttgtttttgtgcctcagcctcctgagtagctgagattacaggcatgtgccaccatgctggctatttattatttatttatttatttatttatttatttttgtatttttagtagagactgggttttgccatgttggccaggctggtctcgaactcctgacctcaagtgatctacccaccttggcctcccaaagtatgggattacaggtgtgagccaccacacctggccaacattgctttctcatttgttcatgtcacacatatttattacaggtgtaaactatgtatcaagcactttgctggttactggggataaaatattgagtaggacaaagccttgactttcatggatctcatagtctattataggaaacagatgataagaacaaaagtgcaatgaggaacacttacagggtaccatggcaggataatggaggggataggttacttaggtggaggggagagggcaggcctctctgagggtgggacatcaagtgagattggattttgaggaaatgccaggttcatgaagagcagatgaatgcgcctcaagcagaagaaaaacatgtggaaaagtattgggggacctgccctgatattcatgtaggttcttttctattttccttaagcatcggccagcttgagaaataaagggacagagtacaaaagagagaaattttaaagctgggcatccgggggagacatcacatgtcagtaggttccgtgatgcctcacaagccgcaaaaaccagcaagtttttattagggagtttcaaaaggggagggagtgtgcgaataggtgtgggtcacagacatcaagtactttacaaggtaatagaatatcacaaggcaagtggaggcagggggagatcacaggaccacaggaccgaggcgaaattaaaattgctaatgaagtttcaggcaccattgtcattgataacatcttatcaggagacagggttttgagatcaaccggtctgaccaaaatttattaggcaggaatttcctcttcctaataagccggggagcgctatgggagactggagtctatttcacctctgcagtctcgaccataagagatgaccacgcccaggggtgccagttcagagacccacccccaggtgtgcattctctttctcagggatgttccatgctgaggaaaagaattcagtgatatttctcccatttgcttttgaaagaagagaaatatgactctatcccacccagctcactggcggtcagagtttaaggttatctctcttattccctgaacaattgctgttatcctgttcttttttcaaggtgcccacatttcatattgctcaaacaaacatgctgtacaatttgtgcagttaatgcaattattacagggtcctgaggcgacatacatcctcctcagctgacaggattaagagattaaaataaagacaggcataggaaatcacaagggtattgattggggaagtgataagtgtccatgaaatctttacaatttatgtttagagattgcagtaaagacaggcataagaaatcacaaaagtattaatttggggaactaatacatgtccatgaaatcttcacaatccacgttcttctgccatggcttcagccggtccctctgtttggggtccctgacttcctgcaacagaaaagtcttggcattcctggcaccaaatgaaggctggtgagtgtagagcacagaggatgagattgagggcatgaggtgcagctggagaggaagctggaggtcacttggagatgcagaaagatgcaaatataagaggaggccacagagggagtttaggtaggagtgttacaatatgattggatttaggctttataatagtttcattttatggctgggcacagtggctcatgcctgtagtcccagcactttgggagattcaggcaggtggatcatttaaggccaggagttcaagaccagcctgggcaacatggtgaaaccccatctctacaaaaatacaaacattggctgcactctggtggtgtgggcttggtggtgcacacctgtagttcctgctttttgggaggctgaggagggaggatctcttgttttttttaatttttaatttttttgacacgtagtcttgctctgttacccaggctggagtgcagtggcaaaatcttggctcactgcaacctctgcctcctgggttcaagcaattctcctgcctcagcctcatgagggaggatctcttgagcccagaggttggggctgccatgagccatgattgcaccactgtattccagactgggcaacagagtgagaccctgtcttaaaataaataaataaatgaatagtctcatctataaaacaaagtcatgattgttgttttcataaaaatgaccatgtgcattataaacatttcacaaaatagggaaaagtaacctaagaggagcaatgattcaccgtggtgactatttttcacccagtcttttgggtgccaggctatgaatggcaagaataggagtgggaactcgttcattagtcatttattgattaaacaaatacctgtgaagcacctactctgtgtcacacactattctcagctgtgggatgtggtgaacacagccaagcaggttcttgcattcttggggaggtacaaggaaagaaacaagttggatgcagctggtgattagtgttatgcagacagccaaacaggctaacacaacatagaggcagtgtcttgagattcctaatgagaggacctctctttggaggggtgacatctgagctgtgatatgagtgacaaggagccaggagaagaagccaaggctgtgggcgaacgagtgtgggggccgagctatggtgggttttgtgggtggtaatgaattgcgtgggctttatttcagatatgatgggaagctacagaaattcattcggaactttgtacaccatgaggcaggagctgatggtggctctaagagggagaggagtcagagttgagatgtattttggaggtgaaccgactcctggtgaactggatgtggagggggactgagggaatggaaggtgtcagggacgactcccagatttctgacttacataactggctgaatggtgggaggtactatttgctgacgtggggaagaatggagagggggaagaaggacatttttagtgaacattgagagttaatgttgggacaaattaaatttgagatgctgtgagacagccaggtggaggtatggaagcattttttttttttttttttttgagacagggtcttactctgttgcccaggccagtgagtgatcgcagctcactgcagcctcgaccccctaggcttaagtgatccttcttcctcagtctcctgagtagctggaacctcaggtgtgcgtgaccacaattggctaattttttttttttttttttttttttttttggtagagatgagttctccctatgttgcccaggcttgtctcaaactcctgggctcaagtgagcctctcccttcagcctcccaaagtgctgagattacaggtgtgagccactgcacctggccctcaggaggcattttgatatctagattagagccctgaggatagttctgagggaagttaatctgggagtggagggcacacagatagccttggaaatggctaaagtcacctggggaaataatgcaggtagagaggaaaaaaatgcctctggaggtacagataaaggaggaaaagcgggcagtggagaagaggaagaactgctagggaggttagtggaaacctggagggtggcgacatgatagtcaggagggaacgaagctttaaaagggaaaatgtggtcaaagatactgaatgatgctgagaagaggaaattatctattggtctggtaacatggaagtccctggggaccttgacaagaacatctctggtgtcatgttggaggaggagccaggttgaagtggattgaagaaggaacatgcaggcagaagaggaagcttgaagagccaacacatatatgaaaagatgcacagtgcaaccactaattaaaaaaatgcaagggaggcaacaatgagacaccatttcttacccatctcattgggcaaccatcaaaatgtcttatggtaggcgttaaaactgaagttttgactgggactcccagtgacatggatgaggcatcccagaggcagatctctgtaagtagagtttaaaaaagaaatggtccccaaggctgtgactcttgggccccagaatcacagcaaggagacaagaagggccagacagtgaagaagagaggactgggtgaggggattcctctggaatgtgtcactgctctgtggtgaggcctcaccatggatgccaggtgcagaggggtgcaggatgtggcctcctcacttcaaggtttgtgacttggtcagctcatgctgctgtaacaagtaccatagactgggtggcttaaacaacaaaaacctatttctcacagtaatggaggctgggaagttcaaggtcaaggttctggctgattgagtgcctcctgagaacctgcctcctgacttgtagacagccaccttctcactatatcttcacatgatgaggacagagatcatctctcatctcttcttattttttataatattttatttatttattttttgagacagggtctcactctgtcacccaggctggagtgcagtggtgcaatcatagctgactgcagcctcaacctcctgggctcaagtggtccttccaactcagcctcctaagtagctgggaccacaggcacatgccaccatgcccggctaatttttgtatttttgatagagatggggtttcaccatgttgcccacactggtcttgaactcctgggctcaaatgatcctcctgccttggcctcccacagtgctgggatcacaggggcaagccaccatgccaagctcatgtctcttcttattagggtgctaaatcccataatgagggctctaccctttggactaattacctcccaaagccccatctcaaaatactatcacgttggggattaaggcttcaacatatgcattttggagggacacaaaaagtcagtccatagcaattagcaagccttctggggaggtttgctgtgtgttcactacagttagaggcacagagaaaactcacactgaagaaagctaaagtgataaccagcagtcggaactttgtctcatttctgatctcaggaggaacatgtcttagtcagtttggactgccatatcaacataccatagactggggtccttaagcaacaaaaatttatttctcacagttctggaggctgggaagttcaagatcaaggcaccagcagactcagtgtctggtgagtgctcccctcctggttcatagacagccatcttttcactgtgttctcacatggcaaaagaggccaaggatctttctgaggccaaggatctctctggggtccttttattttttttccataaaggtaccaatttcatctgtgaaggctccaccttgatggcctaattacctcccaaaggctccacctcctaatgccatgacgtaggggattaggttttaaaacatgaatttgaaggggatacaacactcagtctatggtagaaaggtttaaattggtcagtttcttgttttttcttattctttttcttttttttcttttttctttttcttttttttttttttgagatggagtctctctccatctttttgttttgttttgtttttttgagacagagtctctctctgtcacccaggttggagtgcagcgatgcgatcttggctcactgcaacttctgctgcctgggttcaagcgattctcctgcctcagtctcccaagtagctgggattacaggtgcctgctaccgcacttggctaatttttgaagttttttactacagatgaggtttcaccatcttggccaggctggtattgaactcctgaccttgtgatccacccgccttggcctcccaaagtgctgggattacaggcatgagccaccgtgcccagcttcagctttttattttatgtagggcttttgttgatattatttttttagcttaaggaaattatactattagtttgctaactgtgtttttaaaaatcataaatgggtgttgagttttatcaaatgcttttttttcatctattgagaatccaactctgaaacgaagtagagcttttggaagtcttgtggtgctgaggaggcaaaaataaattttcaaagccttccaacatggagggacatcagtgaacatccagacttgcaggtaagacctgtggagatacgggtacagagacctcaaagcatctcaatccctggttggattaaggcaattttctctactgtctgccataaacaaagggttataacataatcctaaaccgtctgtactttttcttaaacaatgtctgatattcaatcagaaattaccagggatatcaagaggtcaaagcaattgacttgaaatcaaaggaataaaaaaagcccacgggaaatctagatgctggatgtatgagttttaaataatcatggttagcatgtttaagaatataagtgataagatggaaaatttcaccagagaactagaatctaatttaataaaaaagaagagaaattattctctaagcttatctgaaaatttcatttatactgcccaccaccctcttttgccagagtattttaatgaaaatctgtgaatatcaattcatctgtaaacacttgatgatgtcctatattttttccttgagcaaacacatgggtactttatgatcatttgaaacctgtacatatatgctttcacatttttgggtatatttttgtacagtttacaattaaataaaaagggtggtccatattcactgtcatcatttcctgtaaacaccccattcctaccagttccatccctccaccctcttcaaatattccttgcaatggaatataaatttttttcttcagagacagagtcttgctatgttgcccaggctagagtacagtgactattcataggggatcatagtgcactgcagcctctaattcctgggctcaagcaattctcctgcctcagcctttcaattatctgtgactacaagcatgtatcaccacacctggctggaatatttttaaagtaaactttttattaaagtataacatacatagagaaacatgcacatatcacaggcaaacagcttgctgaattttcgtaaagtaaacatacctgtgtaaccatcgcccaaatcaagaaacagaatattttctcgctcctttcccattggagacttccaggggcatctggaccttctcaattgcaagtgtccagcaaatatttattcaagtaattaataaaggaatactggctggttttcgttttagttccatgttgaaacttgaaccagcgagcgaccccctctcagtggacctccatcagaggcatgaaggctgactctgaatgggagcagggagttgttatggccacctgcaatcaatttcttcaaaaacaaagttaaagtagacataggcttataattacaaattcttgaagagtcactttgagtgtgaagaagccaggtaggcagcatttggcaaaggaatgattcttttttgtacagtcattctttggctgctcttctttgcttagacctagttttatttatttatttaaaaatgacagctttggccgggcacggtggctcacgcctgtaatcccagcactttgggaggccaaggcgggtggatcacgaggtcaggagttcgagaccatcctggctaacatggtgaaaccctgtctttactaaaaatacaaaaaaattagctgggtgtggtggcacgcgcctgtagtcccagctacttgggaggctgaggcaggagaatggcatgaacctgggaggtggagcttgcagtgagccgagatcgcgccactgcactccagcatgggcaacagagcaagactccatctcaaaaataaaataaaataaaataaaatgacaactttgttggtatagttcatataccacacaattcacccatttaaagtatacacttcagtggtttttagtaaattcacagatatgtgtaaccatcattaaagtcatttttataattcctttataaaaccttctacccattagcagtcactccccatccttccacagccattttccctcattctaggcaatcatgaatctattttttatctctataaatttgcctattttggatattttatataaatagaataatatgatcttttgtgactagcttttttcacttagcataatgttttcaaagttcattcatggtttagcatgtatcgtcacttcattctttgtatggctgaatattattccattccatttaaaatagctgatttgactgggcatgatggcttatgcctataattccagcactttgggagactgaggcaggaggattgcccaggagtttgagactagcctgggcaacatagtgagacccctatctctaaaacagacaaacaaacaaaataaaattgctgagttgaagtctttgtctagtaagtttgccatctggatttccttaggaactgtttctattgattgctttattccctgtgtatggatcatattttcttatttatttgcatgtttccttttttgtttaaatctatatgtataaaataatatagtgtggcaacttcagaaatcaggttactgattagcttaaggaaattaccttatactactagtttactagctgtgtttttaaaaatcacttgtttgttgttgttgcttatggtgtagatcttgttgctgtctgtttaatgacttttctggactaatattgtagtctgtattctgtgtcatgtgtggtcactgaagtctctgcttggtgagtttagtggtcagatgatgactggacagagattccttatgcgtctgaaaacagtaagtctcccagtctttgccaaggggcctccatgtgagtgttgggaaacactttcaacactcagccaggcaagtgacatgcctttctcagccttcacttgcttgtacaggtcctcaaattcagccagaggtgagagctgagggcctcctcaggcctttcctgaacatgtgcacagccctgagcatgcatgtgaccttttaggttcctggaaatatgtcagagattttcaaagcccccatggacatcccattccccagctcctcctttttggttagtctaatgtttgctccaactgttatccaccaccttacgtagtgtgaagttaaacatttgtctttaattgttttcaatgtccccaaggggaaaaagccttttcaccctgagaaagtactgagtcaggttaaaaaaaattaaaataaagagagtcttgcaagtgggatcttccagggaattaccagacatgtcaaataatgacaattctttaggattgagactttgaaagtgttccagccctgttttgctctgtccggtggctgccaggatgctactttgcactgtaagtataggctgttctttttcttttgaggtggagtcttgctctgtcacacaggctggaatgcagtggcatgatctcggctcactgcaacttctgcttcccatgttcaagtgatttttctgcctcagcctcctgagtagctgggcatgtgccaccatgcccagctaatttttgtatttttagtagagatggggtttcaccatgtttgccaggctggtcttgaactcctgacctcaagtgatccacccgccttggcatcccaaagttctgggattacagttatgagccaccgtgcctggcctaggatgttctttttttttttttttttttttttccttttaggctgttcttttttaaggcaattaaggagcgagggagtggaaaataggaaggggcaagttaaaatgccacaaagcttgctgtttttaatgagattcagtcatttttcttgaataagtgctctgttaataatgaactctgattaaatttcagagttctaaaaaagttgattctgaccatttttttcggccagttttctcattgcttttatggaggagagaattttcagaggtccttatgctcccatttttgctgatgtcacctcttgtattagtcagttctcatgctgctaataaagacatacctgagactgggtaatttataaaggaaagaggtttaattgactcacagttcagcatggctgaggaggcctcaggaaacttacaatcatggcagaaggggaagcaaacacatccgtcttcacatggtgccaagaagtgccgagtgaagtggggaagagatcatcagatctcatgagaactcactcactatcatgagaacagcatgggggaaaccacccccatgtctgttgggggcttctgggaattttttatcattcttcaaaaaagtcacaaggaaaaaatagtaagttttctacttctagaaatgattgtttctgatgtaatgcttggaacacctgcagccatcttgggaccatgaggcaacccagattgacaggttaacatgccggggctggcagaataaaaagatggaaggattctgggttcttgatgattgtgttgaagtgcttaatcaatggcagccctggagctgccatttttgtcatggaaaagaatacatgtccttatacactattttgagttggactttctgttatttggatccataagtgtcataactgacaccatgaggctggaggagtttggaaaatgtacatatatcttcagacatattgccatccccaacaacagagggatttgccactaaacacatataaagagataaatatgtagatgtgtgcctgtgtgtgcacacatttgtgtatatattatctctagaaagattctaagagactggtaacaattcttacctacaggggcaaatttggaagacagacatacttttcactgtttgcctatgtgtttcaatatgtgttgaaagtggttaggaacctgacattgtggaaaataaaatcagcgatggagggagtgaacgcaggaaaagcttctaggatgccatgcaacaggccaaagagatggaattaataaaaaggaaggatgacaattcctgaagaacaaaccaggaagccaccttaaaaatggaaaggaagtaacaatcgaaggcataaactaatatttttctgagatgagaaaggatgatcaaaagagctgaactgtgtttcaacaaaacatattgaaaaatataaaaaatattaacagagtctgatatttcaatgcatcctggtgaagattttatgttttgggtaaatgggaaaagaaattcagtctgaacttggatctctcctttatcaagaaaattgggtgaatactacagcatcaattcttaagtagattttatgcccatcattgttttgggagaccgagaggtatgctctgaaaggaagatatctttttttttttttttttgagacagagtctcactctgtcacccaggctggagtgcagtctcgcaacctcggctcactgcaagctccgccgcctgggttcacgccattctcctgcctcagcctcccgagtagctgggactacaggtgcctgcaaccacgcccagctaattttttgtattttcagtagagacggggtttcactgtgttatccaggatggtctcgatcccctgaccttgtgatctgcctgcctcggcctcccaaagtgctgggattacaggtgtgagtcaccgagccctgcctaaaggaagatatcttaatcaatcaaacatgcttgggaaatgctataggcttcctttggaaatttacagagcttgttaactcagtaaaaaatgatttatctttgtttatccatattttcaaataaagttttttaattttaattttattttatgcagagatggggtctcactatgttacccaggctggtctcaaacctgggctcaagagatcctcccacctcagggtcccaaagtgctgagattataggcatgaacagtggtgcatgcccttccaagaaaaaattttatacttttattaatgtccatataaaagtgtctcagaaactgctactttgggaattattcagcagcagagttccaggattgtgacccaaaaattcttggctccactaagttgttcatatgtaaaggtaacaggactttgtatatttatatttagttatagccaagatatgcaaagttttagacaatgtataattctgtgcacccctcctttaaggttgctgccaacatgagctctagggctgaattagcatgcagggttctttagagatgggaatgaccagaggtagtagggtgtggtggagagagtactaggctaggaatcagcaaatcggatgttaaacacaatgcaaaatccatggccactagtcacgtgatttcagctggttatcttaactttttggatatcaattccaacccctaacaatgagaataattcctgcttccttagactgctgaaggattaaataggataaaagatatgaaattacactcaaagggataagacatgtattatttcaattagagttccccaagaagcggacaatgagataagagtttcaagtacaggtagtttatctgggagatgatccgaggaaacactggttgggagtggggaagggagacagagaagagaaggcagtcaacaaaggtgtgctctcaagcagttaccactgtgggcacctagggctctgtccactgcagaactctgggacctagcatagaatgcacaccttagagttatccccatagtggggtcagggaggtggggtatctacacatccattcccatcagtcattgatgtgggctgctgggggtgggtgttaattctctgttgctcctagccttcctccagctcatgcagggagagctccagcagccaaaggggagcccctaggaaaggagctgcaggtgcacgcagttggaagtcatggaaattgttggttctgatgggatacaggtagagcactgacagtatctactactgtaactatccttcaagttccatttcagcatactaattatcataatcaaaatagtatttggatagaggtgcttgctttagtgtttccccaaatctcctttccaaatactgtctcaaaacctaccttgtccataggaacggctccagcccacattcaagtctaaactcctatgacccagtggcatggcctcgtttagcccttctcatacttgttagtcttgtcctctttgacactgtctcctgcccctctcccacctcccacctagcaagggattgggaacacacagatgctcaggaaggacttgttaacctagagaattaaatttaggatgcaacatgagttttcactcatatatattcccatttccatccagcaatttcatttttgagccagatacctcctgatgagaataatgtgtcaaggaggcctgcataaataaaagtcatgaatgatagccaaacctcttcttaaaaattagattccatctttccccccagcaaaatgttcagtggaactgctcacatggaggaaaatcaactggcttgagtttctcctctgccactctggagcaaccctcttgggacatttatgttttaaaaacatattcttatctcaaaatcttctctatcccctgttgccaacccctcataccactggtcctcagctcctgggtgcttgccccttgcagtcaaggccagggctcctgaagcctttgtgggtttggcaggctgttcaggtatttcattcccaccccactgcccaccgcccccatgccaacccatgtggggagctttcaaaattgcttcttagctgaccttcccaacgaaagatagcccactggcctgagacctgctgtgagtgaggggtcaagagagagacaggccctcctctgcaagaatatctgtcttcttctctcttaagcttgacatcttgaagccatattcactcctgggaaacaactgagggccttgatttttctattgtcatctttttaaaaaaattggttcatgggaggtgaaagccttagatagaaaaactcaaaacagtgcctagaacaacccactgcacgttctcaaaaacactagtgatctgcctgcagcttaatttttttgataatacacaacagagctgtctgcattttttcccactcaattgagtgactttttgatggatttgactggttgttttggcatcgcgtaggcacaaactcgagctggggctccacagaggcggcgaaatcagacatgaataataatcataataaaccttcaaaacatttgaaagtttccaaagtgctttcctgcacatttacctcgttccatcctaaagcgctctgcgacatagacagaattggtattacggcgcccattgtgcctgtgggggacagagaggaccagagatgggtgctggcttttcctggccctgatcagaactagactcctcatccagggctctttccacactgggagagagtgagagagaggatatctagtggggcctgcagggcaggaggctggggcagagactcttcagaatgttagcttgggtagggtcagcagggttcagggaatcaggttctgaagaggaaagcaagcagcaggcactggacaccagcctgccaccaagaccctgatgagatgtgtgagctggcattagggcttgcagagcaccacatgtgaaaaggtctgcagggcaccttacctcgtcatctcctagggctagtgtcaggcatagctgtgaggtgggcacatttcatctccagtcccccttctgggctccctgctctagtgggctggcctttctaccagctccattggccccaggcacatctcctgctcatccttggccccaggctcccttgctctggcccactgtttccatctgccttatccccaggggagctccctgtcccatctccctcttcctgggatccagctctctttgcttgtggatgtaacaagctgcttgccagagaacatctccccaggcccctgggtaaaatccatctgtttttacaggagccttatcaggatggtactgcctctcagcttggcccaagctgtcatcctgagatgtgcacttcccattgacctttccttggaggacttgctcaaatcctgcttcctccaggaagtctttgttgattgctctggtccacgctgatcttgggcttttatgacctactgagaagctggattgatggggttgtggtcccctgcttcttctttatattaatcctcctccttccccctcctcttcttcctcctttaagaagtagtagtggtttctttgtttgcacttatggcctgtgaaaaagaaaacactatgcttgacttcctcccttcctccctccttcattttaacaaatgtgaggtccttcattatattccaataagaagcttaaatattttcacttaatgagagatcatacttatttaagcaaccaaatgaccatctttcccagtataattgcaaaagatcattagttaattcttcttgtagctgctgctttgtatgtcagtccactgaccaggagttctgttccaggagaaggtctctccagagtctctctgcccattcccttcaactcctacacacccttccatccttagctgactgccatcttcaccttttcactctgccttttctagcctagtttctaggcaaacaaatattcttacagcgttgggtttttcctggaaagttcccttgactttcttgccttgaataaaatgtcacttttcatcaaacatagagctgtgttgggttccaagtatcagttttataccatcactttataacacccttgaaaaaaattctttccttgtgatacatgccacctgctgtctctcctcatcattagaaagcacatatttctggtcactttccctgttgaggggtctcaaaattcttgtccccattgtctcttcaccaatattatcctcaaaatgtctaacatcaaatcaacccaaccacccactccactcctgcacctgcattgctaggctgtaggagaatatcacacaaaggtagggattcctgccaccagaagcgtctggtctccccagcatctagttcccttctacttttttggagtgtccctttctccacctcttctccacccaccttcctggtttccttctccctctcttctggctctgtcatacacacacagtggatttccagtgtcctcaaggttactccccatgcctctcactaaaatgttgtgggaactgatacgcctcttcctctgggtcttttcaatctggagtcatgaagtgcagcactagtgatggagctccaggcatcagctggggcaggtttgggtgaggttgtgagttcatctgggagctcctgaaatttataaatggggggttcgggtttgtgacatgtggcactgaattgactacctttctgtcattttgacatatcttgttttcagctctcatcttccagtggacatggagcatatttctcatcttggaaggaatatctaaatggggtgctgttgagtgaggtgggagatgggagaagggagcagacatgggcagaggagcggctgctgctcccgctcaagctccctgcacaggcttcctccaggggcctggaggagacatatcccctagatgtctcctctgtttgggggtgggggcccctcctggtttcctcccatggtggcccccatgatcctaggctacagatgcccttcctgtcttccacacactcagggtggcacaggcggctgctgtgaggtcagcactgggtgcccagttaggaagctgaggatggacatcgctggccaccataatccaactcagagcacaagctccagtgtgcttggggatgtgtccttgtccctctggggatcatgggagttctaggccctccccaccccatcctactccaatttccctttgaagggcctgacaaaggcagggtccccctcccttcacccttctgtacaaatgtgaatcatatttcattttatggcattttctttcagtgaaaaacacatagtttgaccaattaaagcctcttttggaccaagcccctgacagaactggagaggcaactgaaaaggacgtcctgttcctatggttttttgtctctctctctctctctctctctctcctgttttttttttcccttggtcacagttcagatttagagggaagcagtgatgggaataaactgtgaccactctggcctcttggcggctgtagggatccagctcctgctaggccagagagacagaaatgtacttggagagctctgagtgagctcccaggctgggagaggaaggagggaaaggggctgtcttcttgggagtcccatagtggatgtgaggggaagagcccactcaggggagagcagagagggcaggagggagaggccagcgtggtcaggggcacccctcacatgctggccctacttcaggcacgtgtcaaacctggtggaaggagatgctgcaggtatgatgttaagcagcatcatgatagtgctgtgggcagggccacctgcaccatcctgtcagccctgcagacagtggtttagtgggtcctgaaggtgaggctggggcagaagaggaaaaacaagctggatgtgatgtggcaaaggtagctgatgggttatcttctgagaccctctgggaactctcagaatcactgagcaagcaaagaggaggtgtctttcgtgagcagcaccagcaatatgcacattcttaccgccaaggtgaccctacttgtaccaccagaaaggctggaaagacctggggaaattggatcatgggagagtggaaggaaggaataaaagtaaatttgttggacgtttatgtacctggcattgtgtcaggtctgaattaggacagcggcttcagaggtggagagaagtgaatggtcccagggctagtcaggaagttgaatggagatgacatgatcaatgtcagagtgatgcaatggccacattttttagcttgtgcaattggtacaggacccttgctctcagatcctgctactgatatgaggaacctgtagcagagaaagacacaaaagtgagccctcttcccatgagattccagcctaggagggaagacgtgaactaaaagtgacaagtgtggtgtatggtactgagtggtgaggaagaggcccctaaggtgggttagggcatctggctaagttcttggaaggttctaactagtgcagggtctctagggacaccaaagaacccagataggagggaggtttgagacagggggagaaaagcaggacttggagctattctttcacagttggcagggtcgctgagtgggcattgctgactgaaggctgaagcactttactcagacagtggaggagttgggttgcaggtttggacatgctgagtcaggttcctgggagactatgtgctgatgtccagtgagtggtgggttgccagatagataaatgtggtgttcatcagaggactcatggctgcatattcaggtttggatcctttaatatatctgtgggagttgaggtcatgggatagggctgtccagtgaaacgaatgagtcctggaaatggctgacctttcttacttccccccgcccctcaacctatttctctctttctctctttgataaagcagtacaagcctaattaacaaacttgggatgataaaagatgcacataattaatattcacacaatacaaaagagtatacagtgaacagtgagttcccctctccctcccaatccctacaaaccccatccccagagatacatcagtttcttatgtgttcttttagagatattctatgtctatgaagcaatatatatatgttagcacacttcatttacctttctatgtctttcttctaaaatttcgctaaatatcttggtgatcattccttattagtactaaaaatccacctcattcttttatatagctgggtaatattaacataatgtcacatgatatacatgccccataatttaattaaccagttctctacaggtaggaattcagtctgttttcaggcttttgctatatagacaacaccataaaaatattcgtgtgcatacaaacatttagggattgattttggctgcatgtaacagaaaaatcaaacaacagaaaatatttggtttttttctccctcatataataagaaatctagcttaggcaaaactgacatggtttagtggctcagtagtgtcacagtgagttctcatgcctcttttccatggttacaagatggttgctgaagctccagccatcacatccatattccaggcaggagatgggagggaagacagtaagagggagaagagttcatcacaagctaagtctgttatatccttttaagattttctggaagctttccaaataatttttgcttgcatctcattgaccagacctgtgtcaagcaactgttcctatctcaagggaggcttggagatgccttttagttgggttcatggtttttgccaacaaaatcaggttttgttgtaaaggagagaatggacactcggtagatgtctagtagattttatctctagtacaaatttttataaatggaattgctggattaaatactctcagacatttaaaattttgactgtgccaaattgtcatctaaaggggttgtgccagggcatctctacagtgcatgaatatgtctgtttccctacatcactgcctacagactgctgccaaactcttcatggtttgctaatccattgggtgaaaaatgatttcacattgttttaatttgcattccactattttgagtgaggttgagcatcttttcatatgattaaaaacattggcatttaaagggtaattgcagaaaaaattccaggagagggaaggagaaaatgagagaatgacaaagaaggggatgaaggagcttcaaagacaagaagaggatgtgagggactctggcagatgtgcaaagaggtaagatgaggagaaaggagtgcccactgggtttggcaatgtggaggccacttgggactcggtgttggagtagaaaccaagtgaacctcttctcctgagaagtattatttttttctgttatttaaatgggtaaatgaatccagaggggttaaataactgctcaaggtcacagagcttgtaatggaggaggcggaatttgaatccaggtgtgtcggacccccagatactctgaaagtgaatcccacagaggctgtgatggagggagaatgtttggaactactttattttattttattttattattattacactttaagttttaggtacatgtgcacaatgtgcaggttagttacatatgtatacatgtgccatgctggtgtgctgcacccattaactcgtcatttagcattaggtatatctcctaatgctatccctcccccctcccccagtccccagagtgtgatgttccccttcctgtgtccatgtgttctcactgttcaattcccacctatgagtgagaacatgcggtgcttggttttttgtccatgcgatagtttactgagaatgatgatttccaatttcatccatgtccctacaaaggacatgaactcatcatttcttatggctgcatagtattccatggtgtatatgtgccacattttcttaatccagtctatcattgttggacatttgggttggttccaagtctttgctattgtgaatagtgccgctataaacatacgtgtgcacgtgtctttatagcagcatgatttataatcctttgggtatatacccagtaatgggatggctgggtcaaatggtatttctagttctagatccctgaggaatcgccacactgacttccacaagggttgaactagtttacagtcccaccaacagtgtaaaagtgttcctatttctccacatcctctccagcacctgttttttcctgactttttaatgattgccattctaactggtgtgagatggtatctcattgtggttttgatttgcatttctctgatggccagtgatggtgagcattttttcatgtgttttttggctgcataagtgtcttcttttgagaagtgtctgtttatgtcctttgcccactttttgatggggttgtttgtttttttcttgtaaatttgtttgagttctttgtagattctggatattagccctttgtcagatgagtaggttgcgaaaattttctcccattttgtagggtgtctgttcactctgatagtagtttcttttgctgtgcggaagtgctttagtttaattatatcccatttgtcaattttggcttttgttgccattgcttttggtgttttagacatgaagtccttgcccatgcctatgtcctgaatggtaatgcctaggttttcttctagggtttttatggttttaggtctaacgtttaagtctttaatccatcttgaattaatttttgtgtaaggtgtaaggaagggatccagtttcagctttctccatatggctagccagttttcccagcaccatttattaaatagggaatcctttccccattgcttgtttttctcaggtttgtcaaagatcagatagttgtagatatgtggtgttatttgtgagggctctgttctgttccattgatctatatctctgttttggtaccagtaccatgctgttttggtcactgtagccttgtagtatagtttgaagtcaggtagcgtgatgcctccagctttgttcttttggcttaggattgacttggcgatgcaggctcttttttggttccatatgaactttaaaatacttttttccaattctatgaagaaagtcattggtagcttgatggggatggcattgaatctataaattaccttgggcagtatggccattttcatgatattgattcttcctacctaggagcatggaatgttcttccatttgtttgtatcctcttttatttccttgagcagtggtttgtagttctccttgaagaggtccttcacgtcccttgtaagttggattcctaggtattttattctctttgaagcaattgtgaatgggagttcactcatgatttggcactctgtttgtctgttattggtgtataagaatgcttgtgatttttgtacattgattttgtatcctgagactttgctgaagttgcttatcagcttaaggagattttgggctgagacgatggggttttctagatatacaattatgtcatctgcaaacagggacaatgtgacttcctcttttcctaattgaataccctttatttccttctcctgcctaatttccctggccagaacttccaacaccatgttgaataggagtggtgagagagggcatccctgtcttgtgccagttttcaaagggaatgcgtccagtttttgcccattcagtatgatattggctgtgggtttgtcatagatagctctttttattttgagatacatcccatcaatacctaatttattgagagtttttagcatgaagtgttgttgaattttatcaaaggccttttctgcatctattgagataatcatgtggtttttgtctttggttctgtttatatgctggattacattaattgatttgcatatattgaatcagccttgcatcccagggatgaggcccacttgatcatggtggataagctttttgatgtgctgccggattcggtttgccagtattttattgaggatttttgcatcgatgttcatcaaggatattggtctaaaattctcttttttggttgtgtctctgcccggctttggtatcaggatgatgctggcctcataaaatgagttagggaggattctctctttttctattgattggaatagtttcagaaggaatggtaccagttcctccttgtacctctggtagaattcggctgtgaatccagctggtcctggactctttttggttggtaagctattgattattgccacaatgtcagagcctgttattggtctattcagagattcaacttcttcctggtttagtcttgggagggtgtatgtgtcgaggaatttatccatttcttctagattttctattttatttgcatagaggtgtttgtagtattctctgatggtagtttgtacttctgtgggattggtggtgatatcccctttatcattttttattgtgtctatttgattcttctctcttttcttctttattagtcttgctagcggtctatctattttgttgatcctttcaaaaaaccagctcctggattcattaattttttgaaggcttttttgtgtctctatttccttcagttctgccctgattttagttatttcttgccttctgctagcttttgaatgtgtttgctcttgcttttctagttcttttaattgtgatgttagggtgtcaattttggatctttcctgctttctcttgtgggcatttagtgctataaatttccctctacacactgctttgaatgtgtcccagagattctggtatgttgtgtctttgttctcgttggtttcaaagaacatctttatttctgccttcatttcgttatgtacccagtagtcattcaggagcaggttgttcagtttccatgtagttgagtggttttgagtgagtttcttaatcctgagttctagtttgattgcactgtggtctgagagacagtttgttataatttctgttcttttacatttgctgaggagagctttacttccaactatgtggtcaattttggaatatgtgtggtatggtgctgaaaaaaatgtatattctgttgatttggggtagagagttctgtagatgtctattaggtctgcttggtgcagagctgagttcaattcctgggtatccttgttaactttctgtctcgttgatctgtctaatgttgacagtggggtgttaaagtctcccattattattgtgtgggagtctaaatctctttgtaggtcactcaggacttgctttatgaatctgggtgctcctgtattgggtgcatatatatttaggatagttagctcttcttgttgaattgatccctttcccattatgtaatggcctctttgtctcttgatctttgttggtttaaagtctgttttatcagagactaggattgccacccctgcctttttttgttttccatttgcttggtagatcttcctccatccttttattttgagcctatgtgtgtctctgcatgtgagatgggtttcctgaatacagcacactgatggttcttgactttttatccaatttaccagtctgtgtcttttaattggagcatttagtccatttacatttaaagttaatattgttatgtgtgaatttgatcctgtcattatgatgttagctggttattttgctcgttagttgatgcagtttcttcctagcctcgatggtctttacaatttggcatgattttgcagtggctggtaccggttgttcctttccatgtttagtgcttccttcaggagctcttttagggcaggcctggtggtgacaaaatctctcagcatttgcttgtctgtaaagtattttatttctccttcacttacgaaacttagtttggctggatatgaaattctgggttgacaattcttttctttaagaatgttgaatattggcccccactctcttctggcttgtagagtttctgccaagagatacgctgttagtctgatgggcttccctttgtgggtaacccaacctttctctctggctgcccttaacattttttccttcatttcaactgtagtgaatctgacaattatgtgtcttggagttgctcttcttgaggagtatctttatggcattctctgtatttcctgaatctgaatgttggcctgccttgccagattggggaagttctcctggataatatcctgcagagtgtttgccaacttggttccattctccccgtcactttcaggtacaccaatcagacgtagatttggtcttttcacatagtcccatatttcttggaggctttgttcttttctttttattattttttctctaaacttcccttctcacttcatttcattcatttcatcttccatcactgataccctttcttccagttgatcacatcggctcctgatgaggcttctgcattcttcacatagttcttgagccttggctttcagctccatcagctcctttaagcacttctgtgtattggttattctagttatacattcatctaaatttttttcaaagtttttaacttctttgcctttggtttgaatttcctcctgtagctcagagtcgtttgagcgtctgaagcctcctctcaactcgtcaaagtcattctccatccagctttgttccgttgctggtgaggaactgcattcctttggaggaggagaggcgctctgctttttagagtttccagtttttctgctctgttttttccccatctttgtggttttatctacttttggtctttgatgatggtgatgtacagatgagtttttggtgtggatgtcctttctgtttgttagttttccttctaacagacaggaccctcagctgcaggtctgttggagtttgctagaggtccactcctgaccgtttacctgggtaacagcagcggtggctgcagaacagtggattttcgtgaaccacgaatgttgctgtctgatcattcctctggaagttttgtctcagaggagtacccggccatgtgaggtgtcagtctgcccctactggggggtgcctcccagttaggctgctcgggggtcaggggtcagggacccacttgaggaggcagtctgcccgttctcagatctccagctgcgtgctgggagaaccactgctctcttccaagctgtcagacagggacatttaagtctgcagaggttactgctgtctttttgtttgtctgtgccctgcccccagaggtggagcctacagaggcaggcaggcctccttgagctgtggtgggctccacccagttcgagcttcctggctgctttgtttacctaagcaagcctgggcaatggcgggcacccctcccccagcctcactgccgccttgcagtttgatctcagactgctgtgctagcaatcagcgagactccgtgggcgtaggaccctccaagccatgtgcgggatataatctcctggtgtgctgttttttaagcccgtgggaaaagtgcagtattagggtgggagtgacccgattttccaagtgctgtctgtcacccctttctttgactaggaaagggaactccctgaccccttgtgcttcccgagtgaggcaatgcctcaccctgcttcggctcgtgcacggtgcgctgcacccactgtcctgtgcccactgtctggcaccccctagtgagatgaacccggtacctcagatggaaatgcagaaatcacccgtcttctgcgtcgctcacgctgggagctgtagaccggagctgttcctatttggccatcttggctgccctccctcggaagtactttcttggagacctggaaagggcctttcagtttatggatcccctgactcactttacaaatgagggagcagagttccattaaagtgaagagacttgctagaaagagtgggagcccagcaagagccccagatcctgcccgttcagcgcgttttgtgagatcacttctttctccagcaggggacgccagtcagtagctggggctaagttaaaaaaaaaaaaaaatcacctgaggcggtcagcaccacgcacagggcaacccacctgggccctagtggaagccccagcctccagaaggaggagacctggacccaggtcttgatgtacttatgtactcaaaaaagacagggctattgttaaattttgggtccacttggtagtcctttggaagtgatataggagcttaaagcagaccagagaattgcttttccatcttctctggtggcagaacttctaagttgccccacctgaggtcactaacataagttattatctatccttggctctcagtaaagccaactagatggccaaacccctagtgtgttgacagttcattcgcccattcatttgaaatatttttacaattaggcttaaattaatttattgtaattctaacaaaacatgggctagcacccagataaaccctgttgaggagtttgtttagagtggcaaagtgcccaggctctgaagacaaatcatgattggttaagccaatcatggtaatggattcctttttttttttttcctaatactttcccagaaactcttgcagctagatggcggtgggggtggtcaagaacacagttctgaccaatgaaatgaaagagatgggcatgtgaagagtggtcattggtattagatcttccaccttttttttttttttttgagacggagtctcactctgtcgcccaggctggagtgcagtggcatgatctcggctcactgcaagctccacctcctggattcacgccattctcctgcctcagcctcctgagtagctgggactacaggcgcctgccacctcgcccagctaattttttgtatttttagtagagatggggtttcactgtgttatccaggatggtctcgatctgctgacctcgtgatccacctgcctcggcctcccaaagtgctgggactacaggcatgagccaccgtgcccggccccacctttttctttccttgaatatggatatggtgcctgcagtagaggcagccatcttataagagcatgtgatcctctgagcaggtcgtggatttagaacagaccctctactcctctagttcctcccctaccctgcctgccctaatgctggaaacctcccacagactgtcattgccccgggttatgacattttttggtatctttgaacctccaaagagtgtctgtgtctaaaaggaaccggaagacgatcatgagcagaaagataggtccttgatgatttcgttaccaatgttcccaatctctaagtttcttgttatgagagatgattaaatatctttattgtttaagccactgttactgaggtgtcttgagtgtttgtagataaaacgatttctgttatactcttggggtttttatttatatgaagtctcactcatttttcagtgaattgtattctttaatatatcttggagatttatttatatcattacttagaagtctgcctaattcttttcttttttgcaggcatatagtattccgttacaatacatgtaccacaatttattgcccacttccttattagttaaaatttgaattgcttctgttttttttttgctaccacaaagcagagctgtcatcaacattttgaacatatatatcagatacttcttgtcagtatgtgtggaggttaaattgctaactgtggaactgctggatctaatgctgtataaattataaaacttagtggtgttgccaaattatcttccagaaggattctatcaatatatatatattcactaatagtgcacagatgcctatttccctagactgtcgttgcaatggctcctattaactatttatattcctgatagtacaattagtttttggaaaggtatcttcttgttttaatttgcattgatttatttattattaaggaggtcttatgtatacaggacatttgcattataaccttctgttcttaccctcttctccattttttcccccatagaattggtagtctccttcagctttgtgcaggttttttttgtgaatttggaaggttaatcctttgacatatgtgttgcaaattttaccacccctgtttcctgttcatcttttggctttcttagtagtatttctcatccctcaaaaggacttaatttttttattatactttaagttttagggttcatgtgcacaacgtgcaggtttattacatatgtatacatgtgccatgttggtgtgctgcacccattaactcgtcatttacattaggtatatctcctaatgctatccttcccccctccccccaccccacaacaggccccagtgtgtgatattctccttcctgtgtccatgtgttctcattgttcaattcccacctatgagtgagaacatgcggtgcttggttttttgtccttgcgatagtttgctgagaatgatgatttccagcctcatccatgtccctacaaaggacatgaactcatcattttttatggctgcatagtattccatggtgtatatgtgccacattttcttaatccagtctatcattgttggacatttgggttggttccaagtctttgctattgtgaatagtgcggctataaacatacgtgtgcatgtgtctttatagcagcatgatttataatcctttgggtatatacccagtaatgggatggctgggtcaaatggtatttctagttctagatccctgaggaatcgccacactgacttccacaagggttgaactagtacagtcccaccaacagtgtaaaagtgttcctatttctccacatcctctccagcacctgttgtttcctgactttttaatgatagccattctaactggtgtgagatggtatctcattgtggttttgatttgcatttctctgatggccagtgatgatgaacattttttcatgtgtctgttggctgcataaatgtcttcttttgagaagtgtctgttcatatcctttgtccactttttgatgggatcatttgttttttttcttgtaaatttgtttgagttcattgtagattctggatattagccctttgtcagatgagtagattgcaaaaattttctcccattctgtaggttgcctgtccactctgatggtagtttcttttgctgtgcagaagctctttagtttaattagatcccatcggtcaattttggcttttgttgccattgcttctggtgttttagacatgaagtccttgcccacgcctatgtcctgaatggtattgcctaggttttcttctagggtttttatggttttaggtctaacatttaagtctttaatccatcttgaattaatttttgtataaggtgtaaggaagggatccagtttcagctttctacatatggctagccagttttcccagcaccatttattaaatagggaatcctttcctcatttcttgtttttgtcagatttgtcaaagatcagatagttgtagatgtgtggcattatttctgagggctctgttctgttccattggtctatatctctgttttggtaccagtaccatgctgttttggttgctgtagcattgtagtatagtttgaagtcaggtagtgtgatgcctccagatttgttcttttggcttagggttgacttggcaatgcaggctcttttttggttccatatgaactttaaagtagttttttccaattctatgaagaaagtcattggtagcttgatggggatggcattgaatctataaattaccttgggcagtatggccattttcacgatattgattcttcctactcatgagcatggaatgttcttccatttgtttgtatcctcttttatttccttgagcagtggtttgttgttctccttgaagaagtccttcacatcccttgtaagttggattcctaggtattttattctctttgaatcaattgtgaatgggagttcactcataatttggctctctgtttgtctgttattggtgtataagaatgcttgtgatttttgtacattgattttgtatcctgagagtttgctgaagttgcttatcagcttaaggagattttgggctgagacgatggggttttctaaatatacaatcatgtcgtctgcaaacagggacaatgtgacttcctcttttcctaattgaataccctttatttccttctcctgcctaattgccctggccagaacttccaacactatgttgaataggagtggtgagagagggcatccctgtcttgtgccagttttcaaagggaatgcttccagtttttgcccattcagtatgatattggctgtgggtttgtcatagatagctcttattattttgagatacatcccatcaatacctaatttattgagagtttttagcatgaagggctgttgaattttatcaaaggccttttctgcatctattgagataatcatgtggtttttgtctttggttctgtttatatgctggattacgtttattgatttgcatatgttgaaccagccttgtatcccagggatgaagcccacttgattatggtggataagctttttactgtgttgctggattcggtttgccagtattttattgaggatttttgcatcgatgcttatcaaggatattggtctaaaatcctcttttttggttgtgtctctgccaggctttggtatcaggatgatgctggcctcataaaatgagttagggaggattccctctttttctattgattggaatagtttcagaaggaatggtaccagctcctctaaaaggacttaatttttatgtggttgtaggtatcaattatttccttatggcttctgggttttttatcttagaaaggactttgccctccaggattacaaatacatttaccaattcttcccttctcatacttttatggtttttaaattccacttaaacatttgcttctaattgattttatcttgtgtaaggagtaagataagatttactttatatttttttccaaataggcccctctgctgctggctctgagaaactggatttgcacctgggggcctggataagtcatgatcatcttcctgttcctgttagacacagacactctttggagatttgaagataccagaaaatgtcataacctgggggaatgacagtgtgtgtggggtttccagcactagggcaggcacggtaggagaggaaattggggagtagagggtctgttctaaatccatgaccttcaggatgatgatgttttgaagagtctgctctgaaaactgattgtcggtgcccagacaccagggactccgaggatttccttctcgtcaaaggctggccagaactgtcagaaaggaatcatcagacaacttccaggggctcctgtaaagctctttatgacaggttcaattgtggccttccttccccaggtgtccagcaacgactctttcaactgcatcctgacctggctctctcctgtcctcctagctcctcagtcagttacttccttcctggccctgggcttccccaggtcctcatgctgtgcctgtcccacccgcagagccttcccactaaaaatcccaagatagggattttcctccctgatcaggagtgggttggagggagatgccagagttcttggcacaaaggaaattggggttatccatggatgtatatagcaaatgctgtatgaggagtgtagattttgcagatggacttgctttaaaaccatctttaagattatttgagaggctaaaataaaagacagtgaaaatactagtgttagcaaaggtgtggagcaaccagacctctcatatgtagctcataggagcatacagctacgttggaaaactacacaggaaaactggcagtgtctacaaaaactacacagacccctacctcatgatgcagcaactccactcctgggagtacatgcccaggacatgaatatgtatgttcaataaaaacatgttctagagatgttgatagcagcaatatatgcaatagtcccaaactgtaaatgattgaatgcatattgataagagaacaaataaataacttgttgtagggtcatacagtggaatacaattcagtagtaagaaaagaacaaactagtattatcatgttatgggctgaatcgtgtccctcttccaaattcatacgttaaagccctaactgctagtatgtcagaatacaactgtatttggagatagggtctttaaatatgtaattaaattacatgaggtcattagggcaggcactaatccagtatg
